United States Patent Application Publication US 2007/0026454 A1 - sequence listing, part 2

SEQ ID NO: 900 - DNA, 7932 bp, Homo sapiens
acttgcaaactaaggggaatgagcttccttctgaatgtttatgaaggagaggccactgtggtaatgttaaaattaatacacttgttgtatttaggagctaaaagtctcagatgctaaatgaggactgatttgctttttatttgatcatatacctatacatgtgcaaaaaaaattaactacttgttttatagtttctttggggaaaaatagtttaaaattcttatcagttttaagaaaagttattttccagccatagttcaatagctcacaaatgtaactgttactaaaaaaataagtaataaatagccaaaaactggtggccaaagatccagtaaaaaacatcctctttcactcataaatcaacgaaatagtcatgaagcacttctatgcctataaaaatagattcagcaagtctttaaaatatttttgctagaattcacattaatcttcccagagaatactcttatttatactgttgaaacatacataactaaaattgggaatttgtttagaagatatatataactaaaactgagaatttgtttagaagatgtcttatgatttgcatatatgtaaaataaacaaccatgtgttccaaacagttatcccattttgacatccaactgtatggaaaacttacttataatttaatcttaaacatatatgatgcttcaattttcaaagtgctttcatttgataaagcatttatttgataaagcaagggtatgtaacaaaaatattcactatgtaacaaaaatagtaatttccctaatttgtgtttcatttgaaaaatatgattttgatattaaatgcagggtagtgattcataaatagttttttaaaggctgtttggtttagaaaatgtcatttaatgtactctattaataaaattacaggctgtgtcattctagtcatgtctaacagctggtgacacctggagctagccaggaaaatgtctagtgaaacagatgggcttagccccaggccttgaatggaacaattcagatgctgtccaaccctcccaggtgatgggaatttcaaaaggagattaactcctcagtattaaaataccttgccctgttcccattattcccatctagaaaaagcatgctagaaagtaacaacaaaactttgactttaatagttataaattattatgaaaattatcagttagttgaactcggataactcctcactccttttcattcctagaggatagacagtgaagtgcaactacagcccgcaaatgaaaatgaataatattaatccagcccctcaaggcaggcgagtagctgctggtttgtaatcttgaattaaagtttttttatacacaggtttttcggtagacaaattcagggacattttagcagaggaaaaaaaataagcaaaatagtcgagatatcattgttttacaaaaataaatcccattttgcctacagcaatttttttgtttgttttggtatatcattcatggttcttcaaaggtaaaatcacttaagtcctaactgctttccttcagtgtatgttgttaggccattggaatttaccacaaactgctatttcttgtaattctctatcgaatggctccacaatttctattcaaattcgatctaggatggcttcttttcataatatcctgagtgaatagtaaacataggaaaaggaaccagtataaaaatataccagtatgaaaaataaaaaccagtataaaaaagttattttttaatggcaaagtcagtactaaccaagagtattctttagtgtttagagatagccaaaggttgaatttaagtttcagtccttatgccagagaaatatattctctcaaaatattttttgaaaatcctctgcttgtctatggaatgctttcaaataaacctctttcccccgtctccctcccactccagtcatctgtcttagagctattggaatcctggatcattgtgggaaatgaaaggtaagtaagtacatgcctatgatttgttgttggtaagtgtggcgtggggtccaaggaatggttcgtttaaaaataaggcagaccacgtaacttttttttttttgagacggagtctccctctgttgcccaggctggagtgcaatggcgcgatctcggctcactgcaacctctgcctcacgagtacaagcaattctcctgcctcagccttccgagtagctggaactataggtgtgccaccacactcggttaattttgtatttttagtagagatggggtttcatcatggccaggctggtcttgaactcctgacctcgtgatccacctgcctcagcctcccaaagtgctgggattacaggcatgagccaccgtgcctggccgatcacataacttctttttttttaatttaattttattttattattattatactttaagttttagggtacatgtgcacaatgtgcaggttagttacatatgtatacatgtgccatgctggtgtgctgcacccattaactcgtcatttagcattaggtgtatctcctaatgctatccctcccccctccccccaccccacaacagtcccgagtgtgatgttccccttcctgtgtccatgtgttctcattgttcaattcccacctatgagtgagaacatgcagtgtttggtttttgtccttgtgatagtttactgagaatgatgatttccagcttcatccatgtccctacaaaggacatgaactcatcattttttatggctgcatagtattccatggtgtatatgtgccacattttcttaatccagtctatcattgttggacatttgggttggttccaagtctttgctattgtgaatagtgccgcaataaacatacgtgtgcatgcgctcacataacttctaacaatatttaccacattggacttgaaaaattataccttgctttatataagtactgtagtaagcttgaaaacacaataatacagtatacaaataaggttttaaaataattccttttctactttagttatataattattaatagatagttttaaatttccaagaatcattaagtatacatttttaaaaaatatttaattttctattcttttctgttgtgaatggttttgttccttgggcatatagggatcttgctcattataacagactatgagattgttgtatttttctcttaaagtactgtagataactcaatagagctgtgtgttacaattaaccagtagaacataatatctaagtcttattcaatatatttgggttcaaattacactgttagcatttcaaatagtgccaattctgttgactcactgcagaaattcctagaaggaaatataaaaacagacaaatgagaactatgcaaaatatcaaaagccatcattataatatcaactttttctgggatttcttttcataatttcctttgttctaattacctccatgttggagtcatgttggggtcaacatgaaagccattataaaaatcaaacactattccagtgtttgatgctttctttgtatgcagtacattccaaggaatggaaggaatcacagcagtcaaccttggtgtaggcaataaggggtgcattgtttacagataatttaaaaacaacaaaacctatgaaaactcagcctgcttttatcagcagcaatgacagtgataaaatacttctccttatcgggcagaggctccccagtaccctacccttggtgtacttctgccaacataagctcaaaagtactacatgcccaatgcttttgagatgcttattgcaaatggatctcattctcacctttatattttcaatttctgaaaatataaatgtagaagaatatattaccagtgttaatcaaggcagcctataatctgttacaactttaaatgtttaaaatatacataatgaatttttttaaaaagtccagtgaagttgagagaggaattgtggacataagtaactttctacctgaactttcaaatactgataccccagtgctttaaagtcacgagtaggtgcctaaggaaataagtgaaagatcaaaatatgtcatacttgcatttaatgtatgagaatttgttttgaccacagaaccgaactcccactaaggatttcactccctgatagtcattccaaaacttagtataagacttttatttttttctatataaggaatttagtctcaaataagcattcctcactttactggcctagactgaacaaggcaatggctagtggcaatctagtccacaattaatgaagatcatatttttgctgactccttggaccctgggttcatgaagatatgaagaattgaggcaacgacaaaaaaatacattaacaaaaagaaagcaaacattaaagcacaaaagcaccttcatcaatgttctcaccacctgtggttcccaacataaagaattttccatttctgttagctataacactctagagttaggaaagtaactagtactttacaaatatttttcctttcaaatgctttattacagttaagaggaaaaaagaacataatgaacgaaaaaaagaaaaccacaaacattttatatacatgcaaaaaggcaataaagtgacaaaatgtttagaaaaagcatgtgaaaaagtaaaatcattattagtatatgtaaaaaaataattttacttgccttgggtaggtgtctaatttttttctttcctttgtgagaacaccgactaaactagaatgaccagaggttcatttccagaatatattattcacgacgttatttatatgtgtgtttgcatatgtggcatgaaatgtcatatatataaaggatatatgtttaaccaaaaggaagaaaaacaccatacctttgttatttagaaatcaactcacaattgcatagtcaaacctaatcattgttgttttgatataaattttcttgctttattagtgagttggctttgaggaaatgtgtatttccacaggtaaaacaagtatgtgttaatttcttgagcaagtaggattccagtatcagaatacattcttaaatgaattattcctaaataacgcatagcacattacttaatcttataaggaacttattattaggatcttcattaataaatatttatttataaatattgctgtgcttgctaagggcactgacctttggccattatatatatctatatctatgtatatatacaagtgtatctatatatacattatagctatataatgatatatcatgatataaaatatgatatgaaataatataaagtgaaataatgtaaaatgtataacctatatctatatacaagtatatatataatactatatatatacaagtgtttatatacaagtatatataatggtaaaaggtcagtgccttcaacaaagcacagcaataatatatttaaataaatatgtatttattaacaaagatcctaattataagttccttgtaagattatgtgctatgccttagttagaaataattaatttacacatacttgttttacttatggaaatacaaacacatttccttatatacttgtatatgtacaagtgtatatacatatatatatatgaaatatatataataatggcaaaaggtcagtgcatttatacatatttataatgtgtatgttttacctttggtttgtatgatttatatttatatataaatgtacataaatttataaaaatggaagactagctggaaaccagaatctgacttcaaacagttcctggtaaaaataaaatttcccagttaagtttgtaaattagttttttgaaatttagaaaatagtatctcattggaccaatatttataaattgtttcattcccaggtaagtccacagaaatctatttaatttaaataaattttagtaccatgcttaagagatattttcctttttataagtttgttttgttttggtttgtttcctaaaggaactggtttttagcaaggagaccaagaaactctactccctaggggctagcaatgagagaaaggaagccttaagtctttgagcacagggtgacagtttgggtcctatgtgagatgatcaaatccacagcaacagaggaaaggacaaaaggaaaaggtctgtagcagcactacatcagaaaaaaatggattcagcaaggaagtgggtgactctgagtaagcatccatgtcaggatggttttgctacagcccccaacaaaacattaattagtttaagaaactcaacttcggtttacaagtgttttggaaaagtaacaaagaacaacataagtaacaaaataattcctcaggtcattacaatggatgtttcctataactgaaaaatatggttaaaaagtacaaactacatttggtgtgcaaactgtttagttcttaattccaaactaaattgtacattatatagtaaaattttgaccagaaaaacttggagattttagtaaaaatttcattgacatatttacagccccagtgtagtttggccggtgtgcaaagcctgactaaggaggttatagaaaaaaatatcagacttaagcccatcaaatcattaaagatgctttggcaagacttcaagctttacagacatactccatgtgaccagagatgtcataaccagtgttctttctcttgaaatgttagaatgctttagttttattctataatttccgtgttccatggaacagcattcatttctcccagttttagtaacataatgagagatatattgagtgtatagagcaggaaagacatgaaaacttatattgcataatattagcaaacataaaagatagcattataaatttttaaaaatccaaaaaaattccagaaacagaacagtgagcatgtttaaaaagtcaggactgaccgtttctgtgagttctgaggactgtaaatgagcctcaatccataaagctgagaggttgtcttagcccacatatgcagcaggtgactccctctgacaaaagcaagatttagctggatcttttaaaaaaaaaatatacttgtatttgagaataacaataatatagttatattgtaacatacttttatgatgtacatttatattatataataatacatacttgatagatattttagtctattactagttttaatcttcaaatatgcctggaaaaacatttaagcgtatttataaatatttaaatgttatcaagtattggaaaacatgtttgattactatgggaatataaactaaaactccccaaatatatatagaagatgtacacatctatagcatataaaagaattagggattccttcctccccttcttcctttattctgaggaaagaggtagtgaacttgagctttagtttttaacaggttagaaaaaggaatctttttacatatctactaaaagttctattattcaatgtctaagtttttaagtcccttggtttcctagatacttcgatggaatcagcagccattgatccaatgccaactccaagactggaacgtcgcaatgatagttccaaggcggaaatttgacgtaattcttttcgacacagttttacaggtgtgacaccatgaagtcgtcccacatttcccacaacctgaatttgggatgacagtcgactgtgagattttgtaaactgattatcatctgtttctgttttattctcattacctaacatatgcccactggggggtgctaaagaactatgaattggaggtaattctgggatatcttcccagagcttttgaggatttggctgtgttcttaagctgcttgctgaactgtccatttctctttctcttccacttaatttcatactttcaggtctggatgcccattttaattcttctgaaagcatgcctcctccttctggcttcaggactccatctccagcctcttgatctaaaaataatccccaaaccaaaaaattagatactatttcctcaaaattaggtattttaatcaaaacatcttaacataaatacattattatcacccaatatg

SEQ ID NO: 901 - DNA, 835 bp, Homo sapiens
ggcatcattcacgctagaggactggttcgggagtgcttggcagaaacggaacggaatgccagatcctagctgccttgttggttttgaaggatttccatctttttacaagatgagaagttacagttcatctcccctgttcagatgaaacccttgttttcaaaatggttacagtttcgtttttcctcccatggttcacttggctctgaacctacagtctcaaagattgagaaaagattttgcagttaattaggatttgcattttaagtagttaggaactgcccaggttttttttgttttttaagcattgatttaaaagatgcacggaaagttatcttacagcaaactgtagtttgcctccaagacaccattgtctccctttaatcttctcttttgtatacatttgttacccatggtgttctttgttccttttcataagctaataccactgtagggattttgttttgaacgcatattgacagcacgctttacttagtagccggttcccatttgccatacaatgtaggttctgcttaatgtaacttcttttttgcttaagcatttgcatgactattagtgcttcaaagtcaatttttaaaaatgcacaagttataaatacagaagaaagagcaacccaccaaacctaacaaggacccccgaacactttcatactaagactgtaagtagatctcagttctgcgtttattgtaagttgataaaaacatctggaagaaaatgactaaaactgtttgcatctttgtatgtatttattacttgatgtaataaagcttattttcattaacaatttgtattaaaatgtgggttccttgaattctta

SEQ ID NO: 902 - DNA, 14886 bp, Homo sapiens
ccggcctcgcacttccggtggggagattccggcctggagctcccagggccgaggtgagtgggtgtgcggccggcctcccggcgcactcccagaggctggggggccggggctggagaagggaagcgggctccccacccgggatctgcgcgggttgacatggggcacgccacgcccctgcccctccccgggcctcagtttcgccgtctgtggagggggcaggggtctccaagcgccctcctgcaaggcacctgccggacgccggctcatctggtatttcctgagcacctgcgacgtcctgggtgcgggacccgggccggaatcggacacggccctgccctctgaggggctgcttcccgcggtgggattggggcgggcagtaaacacgtgagcaaacaaggaaacgtcagaggtgggagtgccacgaggattgggaggggtggggcattggagaaagtattcagccaagcggaggtctgcggaagggagctgaaggcaggaagagcagcaagtaaagaaaaacacaggtttgatgtgtttgacacgtggcagggggccgctgtggcgggtgctgggaccagtggcagaagaatgaggttacagaggccttccttgtggaccaggctgaggagctgggcttagccttagggcatgatctgtttcgtgtgccatctctctggctgctttatagattccaggccttaggggcgaaagaggaaacagggagaccagttagaccagtggcagtcagcaggtgaaagataattgtggcttagactgtggtagtgggaatggagaggaagagaagtagaggggtcaagaagtgtattgaaagtggaactgacagggcaggatttgagaaatgacagaaataagtggtcaaagatgacttcatcatagatttttggttttggcttaagtaaccaagtgtattatgctggcatttactaaatgactttgggatagattgggagcgtgagaaataattacgaaatcttcttagggcatcttaagttttagatatttggagtgcagctaccaaataggcagttagatatatgagtctgatacagaaaaggtcagggctgatgtaaagaatttagaaatcattggcaagtggattgggtaggatgagattatgtagggtaagatttaagagagaagagaagccaggttccaagctttaggcacccaatttttatagattgagttgacaagaaggtgccagcaaaaaagaccaataaggagtccagaaaagcagaagaaaaaccaggagaatgtggtatcgtggcacccaagagaaggttttttctaggaggaggaagtgatccattgtgtaaggtaagaatagagactaagccggcccggcacggtggctcacgcctgtaatcccagaactttgggaggccaaggcgggcagatcacctgaggccgggagttcgagaccagcctgaccaacatggagaaaccctgtctccactaaaaatacaaaattagccgggcatggtggcacatgcctgtattcccagctcctcgggagcctgaggcgggagaatcacttgaacccgtgaggcggagtttgcggtgagccgagatcacgccattgcactccagccttgaaactccatctcaaaacaacaacaacaacaaaaagaatagagactaagccttcgaaggggcagcagggaggagggtgtggtgactcattggagcagtggagatgggctgaagtgagagcagggggtgaaggagttggactggcagtgcggggtcctctggggaagtttcactgttaaggggaccaggaggggagtaagcctctaccatgagccagcatttaatgctgtacctgatgccactttacagttggagaaactgagtccagaggtcaagtaacttagggtcacacagtagtgagtagggacaccaggatttgattctcagtgtctaactccaaagcccacactcttaagcactaaaccatgctgcccaagttacagttaggaagatggagggaagcaggtgtgccagtgatgcaccagccagccttaccttgatgtgactgctgcccccagctaagctgctctctgtggaaagtggggcagaatatggactttccttcctgagcaaatgagatttcaaaaagagttgtttactcctttaaatcttgtttcccttataaaataagggtggggaccttttcagtttcacgtctgtgtctccagtggtgggcctacaggagtgcttgataaatgctcattaagtgcctagatgatctccagggacccttctagctgagatttggctttgtgtttgggcataggtgaccttctgaatcccaataagaaaataagttaaatttgagacagtgcttcttgtaggcggggtagccatagggacttattggaggcaggggaactgggccaggtctgtgaaggaaggtcagcatttgaacagtggagggagggtgttgcggtgttgcagtgctgcagcaggaaatgcagcaaaagcaggagctgcaagaagttggttaacagaagagtgaacagacttccctggcttggaagccacaggaggagccatgagggaagagtgctcagaagaaagctctgttagtgccagcatgtcctgtgagtgcctgtcacaggacagggtcagcagtggttctcaacagggagcaggtttgatcctcaggtgacatatggcagtgtctagagacatttcttgggtatcacaacttgggatggggggaaggatgtgacaggtgtctggtgggtatgggccagggatgttgctaaacatcctgccatgtagaggatgggtcttctcacaaagaattatctgtccccaaacagcagtaacgcccaggttgagaaaccctggcgtagaggaaacagtgtgggttttgagatctgtagacgtatgtttgaggcccatgcgccctctttgttggaggagcctgatggtggtggttgcaggagaagtagagagaaccgtgtaggagactcctgcagtcatttggggagaggatggtggctgagatggtagtggtggagttcaggacatgtgctcatatttgggatatttctgaagatagagctgacggtatttattgattgaatgtgggctaaggggaagagaggaatcagatgagcctaaggcttttggcctgagcaactaggagagtagtggagccatttgctgggatgggaagtaggaagaggagcaggcttggatgaaatgggggtgtggaaaacacgagtcagtttcagacactctagatgtgagtgagatgcctgatattagatatctaagggaagaagaggttaggtaggcattggatattcttctggagttcacatgaatcagagccggggcatatattgggaagacatcagcttacagaaggcatttgaaggaatgagaatgcattaggtcaggtaggagtctcaactcattggatctgacacctcttttttattacaaatattttgtaacagtcccttttattaccctaaaatgaaacatatgattaataaaaactgcctacacataattttttaaaaatcaacaaatgcagccgggcgcggtggctcacgcctgtaatcccagcactttgggaggcaaggcgggcggatcacctgaggttgggagttcaagaccagcctgaccaacatggagaaaccccatctctactaaaaatataaaaaattagccgggtgtggtggtgcatgcctgtaatcagtcccagctactagggagcctgaggcaggagaatcgcttgaacctgggaggcggagcttgtggtgagccgagattataccattgcactccagcctgggcaacaggagcgaaacttcgtctcaaaaaaaaaataaaataaaatataaataaccatgccctataacataaaaggaaagtaattgatagtaaaacaaaatatgtttcaatatgtaagtttctgggcacaatagtgctggaagttgcagtgaagctgtcccttctgtgtggaccctctaggagtgtgatggccacagacacagactgacacagccgtgttgtgtcgcacctcgaaaaccactagtgccattgctgtagatgatgtggtttttccagaatggacacttttggtgccattttgagaccaattttgaccattttcagtctcccttcattgtacataggcgtcttattcttggaagtgttagttcacagcagaaccatggaaacactgcactgtgtttacatgtaaacagagttacattctaggttcagataattataagctaatctttcacctatatggatgtcaaagtcgtgcgggatgcagagcagtaattggctatgtggactgccccttctttatccctgcttactgaacgccaggagcatatccccaaaataccgccacaggtttccaaagctcctctgaagacaactgtagccccagagattcatttggacacagccagctccctgtttgccccggggaggggaaatagtaacaagagttccagagtgcagaatggaatgtaactgctcccttcagaaatgttggggtgggagatggagaatgtgtctgatcgtgaagcctaggaaggcttcgagaagaaggtggcgtttcaataggatgggaatgtctcaaaggaggatctgtggttgaggggggcacccagatgaagcagcaggtatcatcacataacactggacctgaggctcctccaggcacagacaggtctacccggcatgctccgggcactcatcagggttggctggattgacagggaggctgggagtggtttcatttggcaataccgtaaggcaggctctgcttccagggagtagtggttacagcctggtcttacagtgttccagccgttagagtgttggtttccttctccatttttaacccctaaagaccagaccagtcccctgaaaatcgcatgcctgctctctgtcagtcatcaaaccagacggagaacttaaagtacaccagctgtgcgtaaggccagtgtggtcttactggtccctatctttgtgccgctcgtagcctctcaggggacagacattactcaaatcacaccctgcacaagtgctatgaaagagaagtaggagagccgtgaaagcaacatgtatctcaggggactgattcaggggatggggtggggttccctgaagaagtgacctctgagctgaagataggtaggattgatgaaggactgaagggtgggtgcagtgttcgttcatttccttcagacaacgggaagaaagctggtgtgtttggggagctgaaaggcgcccagtggggccaggtcctggagagcctgtggctgagactgggaagaccagcagggccagatgaggccatgggagccgaaagaagggtgctggtctttatcagaaaagcactggaagctgctgaagggttttaagcagtggcctgacatgatcagtttgtgttttaaaaggtcactttggtggcagttcatggagaatagcttgaggtgacaagacagcagacacgacgtgggtctctgggactgcctgtgccgttgtgggcagcccctccagagccctgagtcacgcagccttcagaggcacccatggctacgagaagcacagtctctgcctgaggctccagagcggccctttttccccagcagcagaccttgggacctgtgagcgctgcatccaattaaccatgggaagggtcagcaccagccaccagccccttaggtgaggactctgcctggggctctgctgatggttccgaatcatggagctgcagagagctcctccagcctggagacgttcttggtgaaagctgtggtctaactccaccggctcttcctgcacattgtattcaagaggggtgcctgcccccgctgactcaggagctccggtgctgcagccgccacgaatggggaggtgggccctcgatgtggcctttttgtggaaggcggtgttgaccctggggctggtgcttctctactactgcttctccatcggcatcaccttctacaacaagtggctgacaaaggtaccaggaggccttgctggggcggggtgctgggatgaaggtggccagagccatggctacggtgcccttcatgtttaacaggaaggcacaagcttcaaccagtctaactggaagccagtcacggctgggctggaacagggccctccaagcctgccgtgccagggttccccttcagtgtttggatccagggaaaccaaggagagcggggggtgtgaagggatgagctggggaaactggggctcaagcagcagctatttaccccactagagaagtatttcaatattttaataagtgatacaacgtagtgggccgcagtggctctcacttgggcataggccgtgaggaaggctgggcaggtagctcacaggtgtgttgaaatggtggagacagcaccaggctaggattgagtctcttggctgccacctgtcttcgtgacctaagagtctgtcattccaagcgatgataccgtaactaagggccctacacacatagcaaggtcctcatgaaccaccgaatgagccccactccagcagaggggcgaagaggaagagggagccggtggggggcaggctgtctaaaccaagccggggtgtctgctttgggctccatacagagcttccatttccccctcttcatgacgatgctgcacctggccgtgatcttcctcttctccgccctgtccagggcgctggttcagtgctccagccacagggcccgtgtggtgctgagctgggccgactacctcagaagagtggctcccacaggtaggtgggggacctcagtgagggcagagcaggaagaggggctggggaaccataggatgagaacaagagagacacccgcatgtctggaagccaagtccctcccctcttcctgcactgttcctcctctgccctcttgacctggcctcccaccacccacgctgctgcctcttgtgcactgcgtgccttcccactgccccaccacacacccacaaaaccccccctgcacctgcggccccgcagctccctctcctgccagcagacaccgagcctggagtgcagccctcaggcctggagataagtggtgagcaggcagggtccctgccctcgcagggctgtgacacggacatggagggcactacggagcccagggaggggaccaacccaaggccggggcccatggctggtagaggaagatttcctaggccaggtgccaagtaggcagagccctgaaggatgcgtgggactggttggccctgggaggaggggccctcgtggcccgagggagatttagtgccagctgtggggtctggaagggaactcaaagtgtttcaggatactgagaacccggtgctggccagaggaagtgggaaaaatgagaactgagagggtgggcaggggtcatgtcctggaggccggattccccgtggaggagtttgtgttccatcctgagggaaaagggtttccagtaagggatcaaccagatcaggttaatacctccgctcagggggctcgccggagtgtttgtggaaaccataccggcccagccagttggaatgggccccagccctaatgctagagcagcccccgacctttgggggccagatattaaccctttagttgctggtggaaaagaaggcccaagggccccacaggaggcaccgggatggttcagaagtgggggacactcaggtgcctcagggtaccagcccaccccagcagagtgtggacctcccaagctgtcctgtgggtgcctgtgtcttcacagctctggcgacggcgcttgacgtgggcttgtccaactggagcttcctgtatgtcaccgtctcgctgtgagtactggccatgccctgctgcctcccttcaggctgaagctgtctgtctgtccagcggggtgtctgcacacccggctgctaggccagccactccaccactctgggaccagcccttgctctctcagcctctccctggcacccagcagctctccgggaagtcgccagcctcttccgtaagcccagcgcagaggagatgctgtgcccacctgccaggcagcgtggggaagccagggagctctcccagaaccccatcatcagagcaggggaaggcaggctgcaaggccacagacaggtggccactggtgggtggtacacgcagccgcagcagagccctatgtggcctgggggctacacaagagtttcttcttccctctgatgttttgcttcagagagcactgttcctgccttcttgtcctcctacttctcatccttccttcccgctcctgggctctgccgagggttaggtaaagaacaggactcagggagctcaacgtcagacctgtaacctcttctctctggtgataaccagaggcctcttagtcagagattccttctgattaaaggtcgcttatcactcagatgacagcccagctctgtttggtcatttcgctcagtgatttgtgctcctgctcctttctcggtgatgggtctgagccctgagctccagcagtgcattgtgggtaattttgcttccaggtacacaatgaccaaatcctcagctgtcctcttcatcttgatcttctctctgatcttcaagctggaggagctggtgaggccccagcgtctcttgtgtccttcctgcccccacagatgctaagaataaagtgggagtctgagcagtggcttgtcctgctgtgtgacagaggagacaagcccagtccaggtggcagtagatccctttctgagaagggacctagacatgggcaatactcagaatatttagaaaccagtgtggcagggtaatgaccaaaggtgaaagcactgcaggatgagggtcccagcagagctgggtctaggaagcaccctgctgtgggaggcagtagccctgtgtgttaggcccagggaggaggtgggaccacttgggggcctaggacagccgtcagtgtggcagagcaagcagggctgttggcataccagctgaccgtcagccctacatgctgacattggtgggcaaggactgtccaggaccccctgggatggagctgaagggtggaaggatttcttgccccaggggcagccaagatggctgctgaccccaggctccaaatgtgatgaacccttgaccctcaagacccccgagttagctgccactgctccccatcctaccagcgcgcggcactggtcctggtggtcctcctcatcgccgggggtctcttcatgttcacctacaagtccacacagttcaacgtggagggcttcgccttggtgctgggggcctcgttcatcggtggcattcgctggaccctcacccagatgctcctgcagaaggctgaactcggtgagcacgtgccactcatcctccagagagaggaaccccggcacaggcagggcggaggcagggcagggccggaccagacctgatggtgcctgtcccccgccctgcaggcctccagaatcccatcgacaccatgttccacctgcagccactcatgttcctggggctcttccctctctttgctgtatttgaaggtacgttgggccttccctctcaagggcacctcagtgcagcagaccacagatcctcgccctgagcccaacacagtggtagctgcagagattattgagatcaaagatgcagtccctcccctggaagcgcatggtttggggtccagcatgataaacgctacagagaaagcacatataaaattcagggaacagtaacagtaagtgtgcacagagccctgaaagtgcaccagggctgttctgatctttttaaacataggaactcatttcatccttccaaaaacctggtgtggcagtactattattatcccccattttgcaggtagaacaaaatgaggcccagagaagtaaagataacttgcccaaggtcccatagctcgtaaatgagccagaatttgaagccagcagcctggctccaagtggtccagccctactcttaaccaccctatcttgcctctaaggaatggggaatcagggattgttccaagatgctggagtaatcaggcaagtcagaaaggcttcccaggccgtggtttggagggtgagtgggattttggcaggctgcagggagcaaggcatctcggaagtaggaataggaggttcagccatgtccaggaatataacctggggatgtgtgttcaaggagtgtgggccacgcaggatcagcagagggtgggcttccagagctgggggctgaagaccaggagccagcacacaggagcctggggacatggtcagttgttcctccactgtcgtcctccagggatgaggagagccctggagaactgtgtaggctgggaggtgtgacgccaccttcctttctttgatgttttgggattagcctttgtcccctttctgtttatccttcctcccagagtcccgtctgtaatgccctcagggtcattacagaaaattctgtcccacatccatttaagtttcaagcagtgaagcgtcttgaacctccccaagaaaattattctgaagccccgttgtccaggaaacttctgttcagggcctcgttttttttccttctttaaaatctctccccactccttcattatgcccccttgtaccaaacgccacactctccctcccctcccgtgtgtttacaccatgccccatctctgcaaaacctcatctgaaagcccctggtagtcgtcacttggcaaagctgcatggatttagctcctttaatcttttctggtaaattaatcccccaagcgccttcattacttatgctgctcttccccgaattcccttcaatttgccgacgcctttgcagttctgctgagcccagcaccaaacaagatgtcctacactgtgaggctgttttgcctggggggactgtcactcggcatttctttggtgcttccctccaaaaatctcaaaatactcgtccagcttccagctaccacagttgtctcttgtgcccagttctgggccccccttcaccctgtgctaatacaccacgaggactttcgtgtgggagggacgccgggagtcattcttccagatggacagtgttggagggaccatgactcctccgaaagtctaagctgaatttggggtagggggtgtgcatgcctgtgtttctggagcaaggggccatgtgtttgcattttctttttgggaaatgttcatcaagtgataccacgggttggagaaataccagtctggtcccaggcctctcattttatcagtaaggaaactgaggtccagaaaggggacacatctcagcccaagtcccacagctctgtactagcaagacctagattaaaatgaacgtttgtagggatagaattttgtccctgtttgtaggtgaactggctgaaatgtagaccaaggagttccctgagtgggctggggcactgttggtccttcgtcacttggtagccgccctaccttctttagcccagtagttaccacagctccaaagaccccatgaagtcagcagccatgagcccctccccacagaccagtaagggaatactgtccaaaggtgcagggcacttccatccgtctttccatgcagggccacccccctctacttcaccccagaggctcagacgagccctccccatcattccgctaggatccccatcatcccactaggatctccatcatcccgctaggatctccttcatcccactgggatctccttcatcccgctaggatcccatcatcatcccactaggatccccatcattccactaggatcccatcgtcatcccgctaggatcccatcgtcatcccgctaggatcccatcgtcatcccgctaggatcccatcatcatcccgctaggatcccatcatcccgctaggatccccatcatcccgctaggatcccatcatcctgctaggatccccatcatcccgctagggtcccatcatcccgctaggatccgcatcatcctgctaggatctggcttgtattgcccccaggcgctctggcagccatcactgcttccctggtttccccaggtctcaggccatctgtgtgggatcactttataccttccatgctttttctctgggctgcagacagttagcaggtctcagtaagaactcactactacagtggaagatcttgtgtggttggcattgggctggccaaggcagcccaggacccggcctcccactctctctccctgttgctttcaggtctccatttgtccacatctgagaaaatcttccgtttccaggacacagggctgctcctgcgggtacttgggagcctcttccttggcgggattctcgcctttggtttgggcttctctgagttcctcctggtctccagaacctccagcctcactctctccattgccggcatttttaaggtacagactcgggcgtgatgccagtcctgtcttagagagggagcccccaggggtttctcaccagcagcttcagtcccagctcctgcaccccagggccctgcagagaagagaaggaagtgccccattaggtgccaggcactttgctgagtgctgtgctggcccctccttctgccttgaccacagccctgtgagagggtatgatcactcccatcccacagacagggacacagatggagagccgcccctccccaagggcacagcaggggcctcaaagccagctctgactctgctaggcctggaatgcattcacattttaccttgactgccaactctggcactgggcagtggcctggagccacaggttgaacagcccctatccagactcatcaggaaagagttccgtgattgactggcggtgtcctccaaggccatggccagggctagtgagaccctgagaaagcacccctgtggccagccttgctgtacctctgcctcgcaggcctgtccttccctctcatacctcttctcacttctccttctccctcccacacatttcaacagtcctccctgttcaggggcagggagggacttttctctttggccaggcacacaccagtgttgaagcagtgttgcctaaacccagaaatgcaggcctgtccaagggtcttctggtggccagccgcatgctgaggcatggctgtggttcttggatgaacggccttgccagtcctgtttggagtctctgtttatagagagccccgggaccagttgtgtcttcagtccggggtaacacagcattctcacacataggctcagggctctcttctgtggctgccttctggggcagccgtcctttatccttgtggataaggcgcgatctggacaccctggtccccagcctgggatctggtttgcctcttttattcctgacagaattccatgacaagcacctcctttgttgcatctcacaaaaggaggctggcgggacagcgccgcaagccggccgggtcccctgacctctctgcctgcctgggcccaggatttcagtaagatcttgatctgcccacctgagtgtacctagtgcccccaccttccaccctcctggtcaagcagccaaatctgcctgttgatcatgctccctcctgcttctctgcccccaggaagtctgcactttgctgttggcagctcatctgctgggcgatcagatcagcctcctgaactggctgggcttcgccctctgcctctcgggaatatccctccacgttgccctcaaagccctgcattccagaggtaacccagagtcccttccagaagcctctgttttctgttcttctccctgtgactcttagtgattctgatgcaggaagtgtgcccggtggctctgctgccgtcactcctctaggaagatgtgggggtcatctccagagtgggtgggtggggcctgggtgactcagcacacatgcaaatcagagcaaaccaagaaaaccacgactgggcctgtaactgtggtctctctctatcccaaggtgatggtggccccaaggccttgaaggggctgggctccagccccgacctggagctgctgctccggagcagccagcgggaggaaggtgacaatgaggaggaggagtactttgtggcccaggggcagcagtgaccagccagggcaaatggcttagaagcaggccactccccagcctgctgccagcactcactgtgctcaagccgccagggctcatcatggtagctgggagctgtggacgggagtcaccaggtggtggggccaagccagggactcatgacttttgcccctcccttcagagcctggtcacacaaggggcgagcaccaggccagcctgggactggccagagctgggcccaagctgcgctggaatcgcagcaggagaggggagtgggctggttcttcccaccacttcccaggctctgacagccgagactcatttccaaggcacagcagctttctaaagggactgagtttggactgggttttggacctccaggggctggagcttcatcacctgggcagtgtcttttctcagagagcaggtttctttatagtttggaaataaatggttcacggtccactggccgccttgtgttgctggagacgtgggggcagggaggggacagtgtgggcctggcctctcctttcctttccctgcctggagccttcttcaaatgtctggtcttaagccaggcctccttcattttctcgctcctgttagaacaccagtcccctccccagtggggccccactgcacctgctggcaggaaataaatgaatgtttactgagtactgcattctggagaccttacatgttttcacagcctagtttgaatactggctttgtcactagctgtgtgaccctaagcaaatgacctaacctgtctgtgccgtagttttttaatctgtgaaatggggataatgtctatctcagagtccttttgaagattgagtcattattagtaacagattaaatgttatataagca

SEQ ID NO: 903 - DNA, 32681 bp, Homo sapiens
aatccgtctgaacttcagttgccttacctgtaaggtaggaatgtttttcagagttcttatgagcatcaactataataatgatatagaagtgagcaatcaactataaagaggctacctgggctgggcacagtggctcacgcctgtaatcccagcactttgagaggccgaggcagatggatcacctgaggtcaggagttcaagaccagcctggccaacatggtgaaaccccgtctctactaaaaatacaaaaattagctgggcgtggtggtgagtatctgtaattccagctactcaggaagctgaggcaggagaatcgcttgaacccaggagacagaggttgaagtgagctgaaatcatgccattgcacttcagcctaggcgacaagagcaagactccatcttttaaaaaaaatttaaaaaaataaaaataaagaggctacctgtacgttactactagatatatgattactatgaagttaccatataaccgatctgtttcaaacaaatcagacttatctagtgggtaagagcaaacccatgggttttgctctcattaattcagccattgttaattaagtgcttacccagtaccatcatcatatgctagtgatgctgctgtctgctcagacctccgttttagagttcctgcagagcttgggggcagctgtggtcttaggcgtattagttgcaatgagtagaaacatagactagcttaatttataggagttttattggcaggatacagtggactttcaggtaccccgagcataggaagtaatagccacataatctggaaagttagcaggtaatggcttttccatctctttctgatttctggcctcagttcatttagatatttatggattcctcctgcagaatcacttcctctgaaaggctcttggttttttattctccatatctttggctcgtacggatctttggcttgccatggtattcgctctgaagcttactatgatcttacttctccagggtcattatcacccagttcccttagtctgtgtcttttatttgtttgtatgtatgtatgtgtgtatttatttatgatggagtctcattccgtcgcccaggctggagcgtaatggtgcaatctgtgctcactgaaacctccgcctcctgggttcaagctgtcctccctgcctcagtctcccgagtagttgggattacaggcgcccaccatcatgcctggctactttttgtatttttactagagacggggttttgccatgttggccagggtggtctcaaactcctgacctcaggcgatccacccaccttggcctcccaaagtgctgcgattatagacatgagccaccacgcccagccagtctctgtcttttaaattcaagagaaagaactggaatagttcagctaaagttgggtattcactttagtcccatcagctatggcagggttgtggagagtgtcattcagttcagagaggctgcctgggctttgtgggaaggacagagtcactgagaatgggggcttattaatatctttcaaatagtttggtggttgcaaatctccatgctttaaaatgtatacgaatttttgaacagccgagaatcattcagggctaactttaataaagagagagtcaatctaggatatgtcatatggggtcaagagaaaataatagctataacctaatgagctttagcttaatctccaaagacggcgttcagaaaggagttaaaaatcatggggtttgtttcttagcagcaccatcgaaattaaggaagggtgtaacttcatttggtaaggactttaaaatgggcatcctcacttggattttttaaattccacttaagaatcatggacttttagacttagaaggcacctgagacatgctttagttctacactcacatctttcaatagaagaaaactgagatttggttaaagggccatgtatacattgtgaaagacctaggattgggtcctgaggcctttggttctaaatccagtcacttgtttcagcagggacaattatcccagcccagtgttctttctgttgtaccttctgtgcctgcttattttaaaaataagaagaagccaaactaaacaaatgatctaaaaagtcatatcgtatagttccatttatatgaagtacaaaaccaggcaaaactcatggatgatgataagtcagaaattcccctttaaaggactggaaggattgacgggaagaggaagtatgaagtaattttctagggtgatgaaaatgttcagtgtctcgttttgagtgctggttacagggagatgcatgtgtatatttatatgatgtatatttatatatacaaacatatgtacccttaagccctctgcattttattgtatgtaaattatatctcagtttttaaaattgacctcacaaccgtgcagtcctgtctactaattgcagcagctttgccgataaggataaggatgcatctctaagcatccagagattgatggcgccacccctagaacaagaactccctgtcttgctgtaactggagcagagcattttccccagaaattatgcagatagggccagtttcttttctgaggtttgtcgtgtgtctaggcacataaaaattacatgtgaaaaattctgccatgagctgcagaagttatggaagccttgggggccataaggccaacccacttcaatccctttaggctgcgtttaattgcagtggacagaagttgaggctggctcaaaggaaaaggggaaagcattggccgaagccagtccaagttctgtcaaccgttatgacttactagctgggtgaccttgggcacttaacaaaacactgagctttagttgtgccatcttcaaatggaggtgataatcctgttctgcctaattcgtggggctgctgggaggacacaataaaataagtgaaagcacttggaaaactagttcctttacattgtcatgttctggaaatgctggctttttatgacagtagacttctgaagcatcccattctgactaggaaatggtcatgaaagcatccctctttctgaggccgatgggcttgtgggggacaggacttttactccttttcatctaagaggtttatacttaccaggctgtgagaactgacatctgtgtttgggctgaaaaattgatagcatacatgcataatagcctcgcgacagctatgctttgtacgccaggagaggcaggtggtccccattagcgaggcatgaattgtgggtgaatggctaaacctggaggatgcagaaaggtctttttcattaagagaggggcctctcctgaacttgtaggcaaggagtgtaaatatacattgaaataatccatcagccaagtgacttcccttcgtcagaccttggagagagaatgctttagttactgcttggaataccagtaagctatcagagttgcctaggataccagtcacatgggcccatcttccagacttgctcaggatgatttattttcctttattttggagagaagtgggggagggggtcagaggtacttgcaaagccttgtccttataagaggggcccttgtgtgaggatatccttacctctctccacttgagttgtcagccgcccttgcccttggcagtagggacgaaaatagcatttcctgtcccagttatcttccccattttctgatgtcgtcccacacagaggaggctttgcattgtgtcctttgaggggaaaggggtggcatcgatgagtggggaggaagcaagagagcatgtagctgggccctgctgatgctgggatcttcctaggatgactgcagaaagaagtagcctggctcctccagctaaccactcaaccaagaaaaggctgtctattcttatctgtctcggagcatatgcttctctcctcccaaggtctcaagacaggaatttgcagtaaatacattcctctaccactgagtcttcttgactcttaaactgaagtgccacattggcatatcttgctactggctgatctatggatgatagatagtttgtcccatttcttcttgctgatttaatctcaagagacaaaatcctaagcagaagttgtggtatgatctagaaaaattcaaaccaggtagtttcatgtgttactttatgcagtgtctgtcttcaaactcttcaaaacatgtaacaagagtgaaaaatgaagaaatactctttttccacctttctgattctttctccccaggcagccgtgtctgtgtttttgtctcgcagaattagagcccattgggaacgatgccaccaccgtcagacattgtcaaagtggccattgagtggccaggtgctaacgcccagctccttgaaatcgaccaggtatgctcctgaagtgagaagcagtggttcaaggaaaggcacctggggagtgcatggcagaggacatcttgagggatggggaccaccggcatcaagagtaagaacgagcaacaggaaggctaagctttgggcctggcccaccctagggaaggtcggtcaccatggcttgggagaggcttcctcttcaacaaaagctgttaggaaagaagttcattctcatgccccagcttgaccctgcttggcaggcctcttgtcagaaccttggcatgagtaggatgttgctgctgttgaaggctttctctctctctctttcagaaacggcccctggcatccattatcaaggaagtttgtgatgggtaggttgaaatggacctcgttttcaacagtggcagctccgactgaaagagcactcctacaccttgaggggagttctgggaaggatctccagttaggcaggtcctcagcatgggggtcttgggaatcattgtcttgggaaggaagtacagttgacaaccatacccctaagacgtttatacttcttaattttttccttaaagtctagcattgccctattgaggtaggatctgagacccctcctcagttctgcacacctcctattgtggtgctcatctttacaaaaggctgaggccatgattttttcaacatgacaacctaaagctttgtttccactgtattccaaataggccacccaatcccttgagcaactcttttgaaaattacttatgagcagcttctgaacaagagagtggccaagtgggatatactgtttttctcttgcataggtggtcgttgccaaacccagagtattataccctccgttatgcagatggtcctcagctgtacatcaccgaacaggttagtacagggagaggcaaaatcaatatgggccttgcttggaattaaacgacccaaggagacggcactatttatcttcactcagcatccaggtagcttccatgtgttgggtaaagagtcactctccggacagactgggaaacaccagcccttgttcttccctagtggctagaaaaaggtggcttttacttcctgagtgcccagggtgctagaggaggatcttagaaattctttgccaaggaataagcaggagaagagggcccgactgaagatcctcagttacatctactgtaaaaaagacaaaacattattgttgattcaacttgcttgtaccactttaacattttatcttagttactttttttgtttatttttcactacccagactcgcagtgacattaagaatgggacaatcttacaactggctatctccccggtaggtattctttcttccttaggagtttattcatgtcacaaacaaatatgagcacctaccatgggccagactctgttctagaaataagtactctggagataagaaagtcagtctttttgtatcaggaaatagtacaggaaaataagtctgtcttggttctcaccacctagtggggagtaaacaaatgcaatagaaggcctgtctcaagggtcttgagagaaagttgcttagggagctgtgggaactcacaaaggggaccacctaactcagcctggagatttccagaaagtcttgccagagaaggcgtcacttagctcagatgttaaaggatgagcaagaattagctagagaaataagaaaaggaaaagtattccagtcagagaaatcagcatatgccaaggcacagaggtatgctgtgtttgggaaaagcaggagtgctgggtggctggaggcttgtagcagtcattgagaagccagatattcaaggttccttgatggcctactcgtaggtttcaactctgtccagaaggaaactggggacattgaagaattttaagcaggaagatatgttatgtttagattttaagttttagaaagatcactttagtgaccatgtggaagatgggccttaagaagaaggttggtggtagtaggaacctttgaagaggctaataaggaatgttaacagcccagtgaaggcaagtggtaatggagatgaaaggatggatatgaagagtatctaggaggtaagctttatgagtatggtgatatgctagatgtggaaggaaaggggagaatggaggatgaccctgatttgtgcaagagcagcccttaaaggtcactaaggaagcaaccagaagggtagaaagaacaccaagaaggtgaagtgactgaggagctttgggcagggagagtgtcaggactgaggagagtatggtctgcaatttttaataagcagagagatttagtaaactgagagcagaaaagctgtctaatgacttgggaggttagaggacactggtgatactcacaaaaaagttatggtggggaggccaggtggccacactgaagtggtcaagtaaaagaaaggtaaaacagtgaggactttgagtctactgctgtatcaagaagcttggttttaaaagaaaacacagagaaggtgataatgcgaaggggacgtggagtcaaaaagatgtgctttttaaaagcaggtaaagcattcatgtgtttcacaaatcaaaaattttcacagagatgtagcaaaaggtctccccgcaactcctgtccccatctgcccagttccccacctttctgacccttcgtgttggttgtttctgttgcaattttttatgtgcccttaagaatgtgttcagatggaagagaggaaggttgaaggtgcaggaaagcaggtaatcaatagaacaggaccttactggaccaggagaggaaggactcaaagcccaggtagagggaatcactttgactgctaggcccatgaagaagacagccaatatggttgcacctttggttacatttgtagaagggcagccagaaaattaagggcatgatggcacttcttttcttggtgcagagagagactggttcatctgagaggaggggaggtatgaagtgatatcagccagcgtttactgaatgcctatattttgctaaatactttgtgtaattaaatcatctaatctttacagacatcccatgagataggtactcttgatagccccattctgtaggcaaggaaactgagggttagagaggttaaattacttgccacttgtcacacagctaataaagtagccaagcccgctctcagacccaggtctgtctgactctaggcccatattcctcccatcatgttcttctgcctccccctcttctcctgaactcttctcatcttaaggacttcattcttccctcctaagctctggtaatttaatatgacagtctgggagttactcacttttatggaagtgccgacacatttcacagacctcttgcacagtgtagttgactttcccagaagcacatctctctggagcgggaggcagcagcccagaaatgctgtctcaggaggaaaattgacatttggagttggaggtttctaagtgggatgcagaccagtgctcttcagattgttctatgctatgaccttttcccgtggcgcacattttctccactgtagagatagcgagggcttctgtattgcagagagcactgtgctttgaagggccagctttgtaatagtaaaagaggagaggcaaaggggagagggccagcaggcctgactccttggcggcagcaggaattgggctccagtcacttgcttaacactgagaaaaaggaaagaagacaggtgtgtttttgttcttaagtctcttgctttctagtggagaacattaaattaacacccaaaaaacagagaatgatgaaacaataaattgtgaggcactatgtagtaatgagctcagcggaaggaaagcccagtgaatactagaggagggattttagccgcagcttgcagaaaaggaggcaggcatcctgctaggaaaagttcatgtgctaggaggaggttttgtcttcaccagccttcattttcaaaaaacaattgggaaattgtttctggctccttgatgttcttaaagtttccccagaactgtcactttgaggaacaatcatatggattctaagagaaagtttttaaaaaattgccaggcttttcacattttaggattaaaagggaccttagaggacatcagattaaattcttcacccaatgcaagaatcccttctacagcgtctttgacaggtggttgtccagattctccttgattgcttctgctgacagggagcttaatacctcaagagaaacctcttctgctgtctaacagttttataaattttattttattttattttattttttttgagatggagtctcactctgttgcccaggctggagtgcagtggcatgatcttggctcactgcagcctccacctcctgggttcaagcaattttcctgcctcagcctcctgagtagctgggattacaggcgcatgccaccatgcccagctaatttttgtgtttttagtagagacggggtttcatcatgttggtcaggttggtctcgaactcctgacctcgtgatctgcccgccttggcctcccaaagtgctgggattacaggtgtaagccactgtacctgaccaattttattttcttttttatttttgagagagagtcttgctctgttacccgggctgcagtgcagtggtgcagtcctagctcactgcaaccttgaattcctgggctcaagcagtcttcccacctcagcctcctgagtagctaggactacaggtgtgcaccaccacacctggctcattttaaaaaattttttgggagtcagggtgtcactctgttggccaggctggtgtctaactcctggcttcaagcaatcctgccttggcctttcaaagccttgggattacatgcatgagccacgcacccagcaagacagcttaaatagaaaaccttcctctattaaaccagtatctgtttctctgtgacttaccatcgttagtgggcctcccagatgcctccagtattcccttggtaggaattttttaaatccataggccaaagcggtacagaaaagatgcagataactacagattggttttggcatactaataactccctgattgattccacaaacatttatttagcaactcctaagctgtgtgaaaaaactagttctgcctcaggtttggatgtccacagaagggcctctgtgagctatccacagagtagtaacctgctccaaggagcagatggcacatatcttgtccctggcctcctagtcccgggctgcacgccagctgatggagaggacccagtcatccaacatggagacccggctggatgccatgaaggagctggccaagctctctgccgacgtgactttcgctactgagttcatcaacatggatggcatcattgtgctgacaaggctcgtggaaagtggaaccaagctcttgtcccagtgagtatgactaaggtctcgttccaaggacttcgacgatttactacatcccacagggcatcctagtctcatttcccttgagtcaaataaggagtttattgaataccacctgtgtgcagagcagtgtgccaagcactagagtccataccaagatatataattccatattgtgattctaaatcgtgtagtctatttgggctctcacaaattaaataacagtacaaaacagtactgtgccaagtgagcagtgaaaataggggctagagaagtcaggaggagagcagtcacgtcgtgacagacctgttaattgctggaaatgtttggtttgatgagggttagtgagcagatggtccagtatctcccaggtgtctgtttgtaatcatcccctgctcctccctcttcagtcacctcccagcccatacacacacacacacacacacacacacgccttcctttgtgtttaccacaggtgtcaacctacccattcaccatctccctgccacacttttgcacagggaggaggagaccagaactttgtgatacccacaagcatcttcatcataccccagagttcacatgcatgcggtgggcagctgtgccttgtgagcagcagtcagtaaacaggtgcttggagcctaacctgccaaagagggagtcagaaatcttctcagcccatagatcaactattgaaattgttagccaaatcgagtaactaatcatagatatttgttttacatattggatcttccagctgtattgaagtcctgaagccttcagctgccatcagcactgacatagttctacagtctcccaagggtacagggttagactggccttagtttcactctcttcagcctgaggataataatagctaccttgcagtattattgtgagaagtattgttaatgagaatgtgtctgaacatgctttgtaaataggaatatcatctgttaattctagagcactgtacagatgtataaaggattaaatgtataaggagaagagaaaaaagagaaaacattttaatccttattctctaccagcactagaataagagctttgcatacatcatcatcttgtcgtctccacaaccctgtgaggttaacgctgtgagactaacttgattttacagaggaagaaattgaattttgaaaagataaaatttgcttggttagtaaggtggacaggaactgaacccatctcttgcactctactgcctcttggcccaaaggttaacatggcacttacacttccttaggttctcccaacaggtgttggagtttgacaaaggtccaatgtcttctttggtcttgggaaatagataagtgattctgtgtccctgggatgaagcatatggagaaggaagatctaattacccagcaacatttttttttttttttttttttgcagcgatagatacctgggctgaatctgctctacactggctaggtgtgcacacaggcacttacagttacagttgcatcgactgatttcccatggggtgttcacattaaaattcatcttttttgtggctgccctcacacctgtgtttcccgatctgaatctttgtctattttgtgtgtgtgttgcacgtgtctcagctacagtgagatgctggcattcaccctgactgccttcctagagctcatggaccatggcattgtctcctgggacatggtttcaatcacctttattaagcaggtgaggcctccaacattctgtctttctctcctccctcagctgccagttcacaaggcttaaggggagatacaggcaatatcgccattctggtgagatcagctttatattccctggggccagatttttcatcctcaagctctagtcttctgtggcttctgaaagatttgcattttgttatattctcagggcctgcactgagatggaactggaccgtcagaactaaatatgatcaaagtagaattagattgtcagtgagactggggataaagccagccagtcaaccagtactagccctgagtcttttgaccgacttcctgagctctctcttctttttgtatatatataaaaaaaatttgcatttcatttgtaaatttgccttctatttacaaatctgcaaggtagcctgtttggattgtcagactaagttcagtgggtaggagagggtacttctggttttaccctcctttcttttacacaaaggagcagtgtcaattcagaatactgaactaaaaccaatgaataatattgtatctgctgccctagaacttcagctatcattggcttaggacattgggactccccgacactggacacaagtgaaatgaccatgtgtcaaggatattataatggggactgagaagaaggattagagtaaaaggcttcaaggtcctttctacctctcaaagtctaagtgtgtttagggggagtgtgtgtcaggggaggtacatggagataaaatgagatcccagtatcagtaaaatcctctgcttttttataccccactttctcaaactggaacccttattttgataaaaagaattaagcttttagattttgaggaaacacaattaagtggatactataatctgagattaaggtatccatgccaagggaatccctggcacattggccagggtagccgtaaaccagataccactatccacctagcaacagctgcccaaatgtgaagcagagagagcttcaagggctagcatcagatgctaagcttctatctttcttgggccctgagcttctcaattgatgtgccatctctgggtctagattgcagggtatgtgagccagcccatggtggacgtgtcaatccttcagaggtccctggccatcctggagagcatggtcttgaacagccagagtctgtaccagaagatagccgaggaaatcaccgtgggacagctcatctcacacctccaggtgtgagtaaaaaaccctacacctccctcccttcacttgtctgtcctcttttctcctcttattttaagtcttccaatcctactctcctttgcttatattccaagctgttggttggcttcttcattcatcacctcttccacactcctgccagaatttctcccatcattcagacttgatcatgtcatgctcctgcccaaaatcctctgtaactctctctgccccttaggttaaaatgaagattttcccagtcttcccataccagggtggtaccaggcaaaattagatgctttctcacatgggcccagtagtctctgtacctatgataattatataaaatactggatttttattatctgttgcccattttgaacatagagcccccttgaaacagagaccaatcattgttgtatcccctgttttgatttaagtagaggctcaattagtgcttgttgaatgaatgctcactgaaccgacgatgcactgtgggtgatttgtaagaaatatcacacaggtgtgagtttggaatatcagttcaaatccaggctcttctgcatactaggtctctgccatcagcaagtaacctagtctcttctggcctcagtttcttcatctctagaataggttaatcaccttcacctctcacactgtgaggatcaaaggagattttaaaaaggtccagcatagaggccaacctgggttaggtattcagtaaattcaggggcttttttcctttgtttgtttgttaagactcttatcacatcctaaaacattttaccagatactgagaccatatgacaaatgaacccattggagcaatgtttctcccgtctccgctgtttttacctcacttccaaccaacctacaccatgtaaggaagctggactttgcaaaacagtggtggcactcctgttgattctcttctgactgttgttcacttctgttttttagacattgtcagaatgttgccagaatcccccaccagttcgaggggaagtcatagctcccagatttgggagtttatagtggccctgtcttcactcagctatgctcccaacttgtttttccccactaatccaagtaaaaagaaagcacaattatttctttgcaactctgatttctccttgtcacttttaaggaattttcagcctcagctttctttgcttttcttttttgagacagggtctcactctgccgtccaagctggagcgcagtggcatgatcataactcactgcaggctcaagcgatcctccccatctcagcctcccgagtagctggaatcacaggcacactccacaacacctggctagttttttttttttttttatttttgtagagacagggtctcgctgtgttgtccaggctggtctcaaactgttgggctcaagcagtcctcccaccccagcctcctgagtagctgggactacaggtgtgagtcaccatgcctggtctagcctcagctttcatacccagcgagccaccaaggttgattaaggtgagagggacattataaactccagatagagaattctgattttcctgtaacctcacatctacttctctggtttttttttttgtctctgaattcagagtggccccagttgcctccctagggatgataggggaacatggcatttcataggagccaatactttcagcccacagctgtcaccagaacttatatgctttcctttttgggctgagggatacttagtgccctctgttagactccctgggtaccatgtgactaaccaggaagcccatcagaccctctggaaagacagccacagaatgcacccaagacatggcaggtggagatgtcaagtaccaggattgtaagattccagagaatgattgtagttattttgtttgttcataataaaataagtttatagtcaaagactttaaaaatacagaaaaacgcaaaattatttgcccattatctcacctccagacatacccactgttaaacattaaattgaatgtcccttcagtatttttatgcatatttttaacaaaatcgggatctcattatatatactatgtgtaccttgattttttttaactgaataatacaccttgaacatttctccatgtcaaagatttttctaaaagggtagttctaagtcttttttgcaacctagacacctttgaaaatctggtaacaagtatatactctcaccagtttggaaaaaataccacttagttggcaaactacatagaataatttctgtatcattcctggggttcacaaatactctaagctcatccctgaatcccaggttaagaatctttaccctaaaacatgacttttaataactacttaagattctcatatgtataaatgttggctaatgtgaccatttggattactttccattcttttttaagtagtactttaatgaaacgccttgtcagtaaatcttgcatagctctctgattactgtcttaggataaattcctattagtgaaattgctgggtcaagagcatgcccactttgaatgcttttgagactgagctccagatcattatttgcttataatctgtgagtgattgttttaaaccatttctaagcatcatcttgctgttcagtcttctaatctccctctctcttctttctccattgacacagctccaaccaggagattcagacctacgccattgcactgattaatgcactttttctgaaggctcctgaggacaaacgacaggtctgtggctgccttttcacatttttcatctgggctcttctgagataattctcaccccatgcactctttgctatgcagagagcacaaatccagcaattttcccaagagttcttcctcttagctgtctggtctggagcccaggagggtggctttgctaaggaagacccagggaagacctatgaggggaaaccagctgggtcttagatgagagcagggcccttcaaactttttcctctaaagggccagagaataaatatgtttgactttatgggccatatggtctatgtgatagctactcaaccttgccattgtagccaaaagcagcctcggccagtaggtaaatgaatgggtatggctgtcttccaataaaatcttatttacaaaaacaggcaacaggcctaatatggccatagtttgccaactcctgggttacagaatcaagaataaggaagaggagaccctgtggctaccctgagtccaaggagtccaatatgaatgggatttcacactaaatcttaggtttaaaggttctctgatggagattctaaacatcttccttcccctgttcattaactgtgacattatgcagatagctctgcctctgtgaaccttagtttcctcacctgtcacatgggagcaacaacatctgccttgtttacctcacaaggatgtctgaggaaaaacaagatccctgtttcacaaataaggaaactaagaatcagctgggtggtggaacaaacactgacctaagagccgaggggcctgggactaagtattctccctgctgctggctggacaagtgtttgtaacctctttttgggtctcagtttctctttctgtaaaatgaaagggccagtttaaatgatctctgacagcccttccaatactaacattctagatttctctgagaaaagcccaagtggtgttaaaagtaagacattttagttctctgacaatctcatgggctcagtaagatgaaattcaagtgggatcatgtatgtacccagctcttggtagattctagagggaagaccagaagcatctgtggttctgtctgtccttgtctttcttggatggcttggctctgttaatctgccttcccggtccttgtttgaatgtaagctgaaagctcattccgtctgcttctctctgtgcttttgctttctgccggcaggacaagcaccttaatcctctagacctgcctgtcactgtaagtagcactgccatgtggaaagggccccagctcttgcaggtggggaagtcaaagctaggcaagaatctcatggtctgatctagatgttcagggcatgccaagacccagggaaaggttgtgtgctgtgaatctcctttgtcaggacacttagggaagtactgcagattagagtcacagaaaggattaagggggtacctgccccagggagtgtggccccagccttcctttataacttgcctttgcatgggtctgtagttcaactagggcagaccagactcagaaacagctcgtaactttgatctagacaataccatggatgcgtcaccttcttacttgctttagtggaagagaaaaggtatccgtgccctttttggactcttactagaccgtgggaatccgaaaaggtttagacaatcgacaaaagggaatttggatgctcatttcttcattatagggagctttagagaggtcagctttgcgaggagatgaaaggggataagtgcctccccctgacaccacagagaagcttttggtctaagacctttatattctagctgcagaccactgtcaattacccaccttatgagttgtccacagcaagatttaatctcagtcgacctcctatagttaccagagaagtttctaggccactgtcctcctctgctagccagtatgtattcagagaatgcaaagtaaaatttaatgttcctggcagcattagccatttggaatatggctagaaatccagaagtgtgacagaggggcctttcagctctgagaaaaatgacacagagctcacagatactactccataggagaggtgtgacagctccctcaggcccactgatttaggattctctataaaattaaatgaaggcagcagtttagaaaatgaagtcatggtaattaacatcagtaagaagtgatggtcgacactggaaggaggagacaagaattatgaaaagctgtcagaaaaattaaaggcattgtaatctgggaccattttgtttatgggaaaatagcttcacatctcagtagctcctcagggtatcacagtgtcacaacacagaataatcactgatgttctttttgatgaagccgactccttagcagtgattaaattatcactgtagtcacttcagaaataaatgtatataatatgtctttaaaagatttgcataagaatggtcaaaataatgattctgagagaacccttaaagctttgctccctggaagattcatttatgtaggaaacttgatttcctgggtgggctaaataaataaagcataactatcaaagtctggatcaaatattataaaaaaggtgagcctgttataaaaaattacccaaaacaccagactcattgttctctaagccagttagaacggaatcctagactacttactgttgtagagcgtccagaccccagccgtctgctgtagggtgggagggggttgctggaccaaagcccttccttgtttggagtcagtgcttcactagagttccttctagccttagcagtggggtctacctggcacgatgcatgtggcttagaaaccatcacactgctctgtgtccatgtgcaatgtccttgtgacacaagcgtctcatcttcaagcagtcctcatctctctttgaagacagtggagttgattgtgccattaggaaaggaaatcctatttgaattaatttgcactcacaaaaatagggaatgttgcagagtgtaaaatacatctgatggtcagtggattttcgttcattcacccacttttcatttgggaggaaaaaaatttaagaaagcaaaaaaggcccagaattttgacatcaccttcctctcgatagtagtcacaggtgtgtgcctgccaccctgccttatatttgcttattttcctccacaggatatggcaaatgcatttgcacagaagcatctccggtctataatcctgaatgtgagttcctggaacatgctgtattttattactattaacaacaattattactgttattgttaatatattattattgaaattattaatgagtgaggaggacacacagaggaaccttatcaataggtaaatacctcttgaactgaatagctttttcccgcgatcctctgtgagcagagttgcctctaggcagccatctcaccagcaattgcagtgcgtccagggagggaccaaggccagctctactgtttgttgccctgcaactccagaatttttatccagagggaatatgttaaaataggcacaaagggggaaaataactcatccaactgacactgattaaaaatctgaattgtgtagggcactgacagaactaagtaagcaagtgtatttgctctcaaagaccttctggcctggtaggaaagactagtgatcatagtggggtgtgatctgggtttgtggtctaggaaaggatggaggaggaacagtgatttctgccttgaagaagagtgtttccggaaacttttagaggaatgtcttcaggtgacccttagaggatgagtaggcagaccgggaataacaggaatttcagtcagagggcagccagaacccagaaggagtgtgtgattaggcacagagcaaggagcaagtagatgaggaggctagagaggtagcgaggaccagatcaggaaaggttagtctcattcctaaggacagctgagggcatttaattgagcttgtgaagtaaccagatttgcattttagaaagagcacatgaaagacatgtgtttgctaaggggtacctgagggaggagagcagagcaggagctggcagggggatctggaaagaggtataaatccctgttaccacctgtggggtggagtagggctgatgttgggaggtggggccggtgggagtggaggaggagagccaaggatctgaattaaaaggaggcaactttggccggacgtggtggctcacacctgtaatcccagcattttgggaggctgaggcgggtggattgcctgaggtcaggagttcgagaccagcctgaccgacatggtgaaaccttgtctttactaaaaatacaaaaattagccgggcgtggtgataggcgcctgtaatcccagctactcaggaggctgaggcaggagaattgcttgaaacccgggaggtggaggttgcagtgagccgagaccaggccattgcgctctagcctggacaacaagagcgaaactctgtctcaaaaaaaaaggaggcaactttatcaactgtcagaaacaagggaaacctgggagaccacagtgaagggaataaaatgaaaaattagaagtcaagtttaagacttaagctaaacatggactttggagtctgccattttccaatctttgatcttgagcatttcacataacttctctggacttcagtttgctcatctggatatgaggactaagtgagctaatataatactgtgcttagcagggtgtctggcactcagtaagcactttgctcgtattggcagaacaggatgcagaggtgataggattgaagaagtaagctctgagcacttgtgaagctgagcagtcagctgctctaaaatgcagagtctgccagacttcaccttgcagaaccagcttctccctgctggctgcttccctggtcacacccagctaccagcctggcaggaggggccccaagcccacaagtgacaggagtacacaggttcccacacattcctgcctacactcctgagcagctgtcctggtcaccctcttctgcatgtgtggggatgagtgcgcccttctgaaggaaatttaattatgtttgagacttactatttaatcgggttagaagttcaactcatttctggacaaaccttgtgaacaagtaaagatttcactatagaaggcagttcagcatcaggactcaggacttaagtggcctggcaggaaatggctaatgcatggtcactgaagtccagggatttcactgagtcaagccagagaactaagaccctgagatacttgacagtcaagtgagacttcaggtaaaacctcaaactgtcactcatcagactggagctgtacttctttaagccattgatgctaggataattaattaccttcctgccctgatgtttcttaagttggagaaagagaattaaagagaatgaaaatcagaatcacattaacttccacctctattcaaagctgttttataaattagggagaagagtgaggagagaggaataggatagacgaaggtagagagagggagcagtggagaagaaaacctcagagtgaggcaaaggaagaggtgtgaaggggaaaagaagtggcgatggcagggaagagcccctggccatgagagagactggggggagtgggaaggaagggaagttatggggcagggggcacagagcagagaacaagagagtaaggctagagagatgaaagaaacagtgagactgagctaagaagagcgatctcacgcttaagagacagagggcgtgcctgtgacagggcgggagctacaggactggacatgatcaccgattcagggggagggagggatgcaggcagaggcctaactccagcatgttagcatgtgctatggaagtgctgtccacaatggtggccaccagtcatgtgtagtactttaaataagtctgttgtggctgaggacctaatttgtaattttaatttcattttaaatttaaatatccgtatgtggctcatggctgctgtattaggaagtgtagatctagagaaacagctagaaaaaggagagagcactggagtcacagtaggggaagaggtctagagcaggaccgtccagtggacatagaacccaaaccatgcacatgattttaaacattttagtagcagcatgaaaaaggaatagggacattaagttcaataatatattttattcagcccatgatatcgaaaacgttaccatttcaacaagtaataaatatgaaatattattaataagacattttacattttcttttttcctactaaggcttcaagatccggtatgcatttacactcacagcacctctcagtttggcctaacatttcatgggcctgggggctaccaaactggacctcacaggtctaaagagattgatctagagtcagagcaaactctagggagagctgatccaaagttagaaggagctttaaaaagatactgagtcagatacctctctaaagtcagagcgctctagagcattgctattcagtagaactctgttaatggaagtgttccgtatctgcattgctgtagccgctagccacggtgactactaagcacttaaaatgtggctggtgcaactaaggaaccaaattttcaacttaaatttgttttaactgatttaaatgcaaatagctgcatatggctagtggctgctatactggacagcacagccctagagacagagctactgagtagggaaattgaaggacatagtggtggtacatgtggaaaatggaggagagcctcatttgggcaagaaagaaccaagagggacaggattcataatggtgggtgagacagagggagtgacaaatacaagggagcaagaagggaagcaggatattgtgggagtgaggacaggatggtgagagacaggaatgtaatcaagggttgatcagctaggacagaccgagggagacatagcatgcaagagaaagacagagacagaacatgagacaggaccaggggacctaaagtggggtgtgggcatcagagggacaaaggaggaggtgatgaaccgacaggggaatgtgggggcacagagacagtggggagggagagtcaggagggagagggacatggtgtgggcggcacagggagcagggacagagtgataggagagaggagaggacaagtgagaggaaggaaggaaggagagggccgtgggagggagctggtaggagagtgaactgttcctcctttgtgttgctatctcagtatcattgaaagaaaatggcctttcccaaagcctctctgctgggtgaagccatccaaaacattttatttttctaagggaaaaacaactctgcctccatgcacaccatctattgttttgcatttagtaggcctgtgaaatgcctgattggaggaaggtccagcccccaatgttctgtatcatagccttgatggagtagcctcccccatttctggtgtggttgggtatagcccctgccttcactctgcttcccctgcccaggggaatgcagaggaagggatggcgcctttcaggcctgcagtgagtcatctctgcctgaaccaagcccattcatgctccatcgccttctagaatatgaagtcctcgtgtgtgggaggaaagctctgttcccttcccaacatacattccttttccttagcatggatgtggcccttcattaaaagagatcagttcagtcccctgctccctgcctgtgctttttctagcatgtgatccgagggaaccgccccatcaaaactgagatggcccatcagctatatgtccttcaagtcctaacctttaaccttctggaagaaaggatgatgaccaagatggaccccaatgaccaggtaggtgctaagtggggcagctgttttctcatggctgtggtgcagtccagccttagtctatgtgccaggcactgtgcttggtctttgtctgcagaagtagtttgcatctgccctagaaaatctagcatgatctgcaccatgagccaagcccatttctgtcctgctgtggtagaggtgatgcctcctaagggattgattggggccaaagtttggcccagaaaagcctgacccactgtttcttttccttgctcccttggttagccgattcacctgctgactgtctgtttcacctcgcaggctcaaagggacatcatatttgaactgaggaggattgcatttgacgcagagtctgatcctagcaatgcccctgggagtgggaccgaaaaacgcaaagccatgtacacaaaggactacaaaatgctgggatttaccgtaagtacctcagagcatagacggtggtaggccctctcccctgatgggaagtcaatggtcccacccagacagagctctgacaaccaaccccatggtggccctggaatagatgacagttaggaagctggtggagctttaatgcttgctttgctttgttgatggtgagtctgtgagtttatgtgcaaagtttggccctgtgaaacgaatccatctgtaggggggttgcggtcagctagagtgggtagagaggggacctgtcctcttacccaaactgctaggttctttgcaaagctagtgtgaatattttgtgatagagtagggcttgaggatggggttaactggaagaagtatttcttgcgtacctactcagtgtgcagcagcatgtgaagtaggttctgggatgcatggtgaggcagccaccgtccagcactcaagagctcacagttcagtggtggtgatgggtgtgaaaagagctaggacagaggtgggtgctgagtggtagcagcatcaagaggagaggcgagagggcatcccctcaggtccctgcatacacggagactgccgcatctcaaattgggtgtctttatttctctagaaccacatcaatccagccatggactttacccagactcctcctggaatgctggccttggacaacatgctgtacttggctaaagtccaccaggacacctacatccgggtaaaggcaggggagctggccttctcagtcctggtgccacatctcctgccttcctccttcatctccctaatcctccctttctcttcccccgacagattgtcttggagaacagtagccgggaagacaaacatgaatgcccctttggccgcagtgccattgagctcaccaaaatgctctgtgaaatcctgcaggttggggaactacgtaagtctctgcagctccctcttcttcagccattccttgtcatcaagagctcagtgagactcaaaattataaacagttacatgtcagtggggtcgggcgtggtggttcacacctgtaatctcagcactttgggagactgaggcaggaggatcacttgagcccaggagtccaaaaccagtctgggcaacatagtgagaccccatctctaaaaaaaaaaaaaaaaaaaaaaaaaaccaaaaattagccaactggtagtgcatgcctctggtcccaactactcaggaagctgaggcaggaggatcactgtgtcaggaggtcaaggctatggtgagcatagtcatgccactgcattccagcctgggcgacagagtgagactctatcttaaaaaaaaaaaaaaaaaaaagatgtcagtgggactagacaaccttaggtgggtttttaattttgttttttgttttaaatcactgcatcagctgataattccatcttatccttatttatgggaatcatggttgttgctttgtttgaactggcaatttgaatcatattccaaagctaccccatgcctgtgggtaagggctggctgagtctgtaacagggtagagggaaggcaagaaaatgcaccctggagaagaaagctaaggacgtgagaaacgcccatcccacgctccctgttaattgcgcgccttaggctgcttttgttcctcgggactttggtgcaaagtttccagacatgagctcccaggcccttgtggacagaggcttcatcttctccctgttttttcacttccacagcaaatgaaggacgcaatgactaccacccgatgttctttacccatgaccgagcctttgaagagctctttggaatctgcatccagctgttgaacaagacctggaaggagatgagggcaacagcagaggacttcaacaaggtcagtgtctccgggctgctctgaggcccacgggaggagaccatcacacgacagcctttgacagctggctggcacctggagaatccctgagctggaaaagcagcttggtctgcagaactgagtcacaagactgaggcactggggagcctcagccccatctggttgttgctccctctgtgaccttgagcttgtcttccacttggtgccgtaggccctcatttgtccattgaagttagcacctgtccctcccgtcctccagagaggtcaggaggataagcattagaagactcactgtggtttattgagtgcttactgtgcaggtactgctgtagttttgtgaactgggaaggttaggagagaagagtggactggcatgatgtgcacaccctgggtacttaatcgatagttatccctcggtgctttcagtcctcactctatgcagagcactgttgtgccaggccctcaaaagctgatcatctaggggtcgagtgttttgaagttgatcatctcatcataaaaaatttggaaagtataaagaataaaaagttacctgtatttacaccatccagtgacaaacatttttgttttcctctagtcttttttatcccctacaggtttttccttcattagcaagatcatactgcgcatgcagtgtggtatcctgttgttttctttaatagttgttttaaggggaccaatgcatttttttaaaacaccacagcgtgccagaactgcgcttgcctttctattcttttgtttgtttttttgagacagagtttcactcttgtcacccaggctggagtgcagtggcactgtctcggctcactgcaacctccacctccgaggttgaagtgatccttctacttcagcctcctgagtagctgggactacaggcgtgagccaccacacctggctaatttttgtatttttagtagagacggggtttcaccatgttggccaggctggtctcaaactcctgacctcaggtgatccgcctgcctcagcctcccaaagcatgagctactgcaaccggctggtatctcatattctttatggcaacacctatcaggagatgtgtcttcctttctctcggtttagagatgagtagatgcacacctaaggatgttaagtgacttgctgaagggacagagtcaagatgtgaacccatttctttctgactacaaaaatccatgctcatttcccccacaccattgaccaattgaaatatatgggaaataaagcatctatcagtgtcagtcatgtgacctgaataaccatctaagaaggtataccttactcacccagcagatgtctgtagtgcctgccctgctcaagaccctggggcaggaaagagccttggtgctccataataggcctgtccatttctcaagagtagtggtgtgagttggctgggttcttctcctcttaggttatgcaagtcgtccgagagcaaatcactcgagctttgccctccaaacccaactctttggatcagttcaagagcaaattgcgtagcctgagttactctgagattctacgactgcgccagtctgagaggatgagtcaggatgacttccagtccccgccaattgtgtaagttccatctcaggggaggctggcgggggaggtggctgccagctctgctttccttccagagctccactgtccccatgaccttccgctcactccagtgtgtgtccaccccagggagctgagggagaagatccagcccgagatccttgagctgatcaagcagcagcgcctgaaccggctctgtgagggcagcagcttccgaaagattgggaaccgccgaaggcaaggtgagaggagacggggcaatccttggtgccgggaagagcctgcctggatggccccttttgtgcccaggcctttcccagtactgtcgttgctcacctgtttggcttcccttgtgttccagaacggttctggtactgccggttggcactgaaccacaaggtccttcactatggtgacttggatgacaacccacaaggggaggtgacatttgaatccctgcaggagaaaagtaggttcatttctctgttgatgtgtcatggttgctggacttgtcaggagacaggagttctagtccagctgtttgtagctgatcatctgggcttgtacctgttacctctctggacctgtttccttatctgtcagcgatttcctctacctggcctactcggtggggtggtttggagaaacaatgagttcacaggtgtgaatgtattgtgtagactgtaaagggtggtacatgactaagtcgaaaggcagtagttaagaggagaagctgtgaagccagactgcccacattcaaatcctggctttgctcctaattaacttgaattctaattaattgcaagttctcccctctgccttggtttcttctcctgtaaagtgggaataatagccacactttcctcctaagaggattgcatgagtaatgtatgcaaagcacttagaagagtggttggcaggtagtcagcataactgttagcagctgccactgctgttggcgatgatggcatcatcatcgccattattgtgaaggagaggggaagggagtcaccaaggtcccgttccttggggatataaatccaagagccctgaagtgaccctcagttagctttgacacagcctcactgggctgtggtctacaggagtgaccaagacggagggaacagtacaaggccatcctccccaccaccctcactgagctcatacagcagcccttggagtttggggctgaggcttcctatgcatctgccccagtacctcccttccagcactgatgtaggcactgaccagcttgcagcatgaacttccagagactaattcccatcatttatcagttcctgttgcagacattaaggccattgtcactgggaaagattgtccccacatgaaagagaaaagtgctctgaaacagaacaaggtgagtagagaggccagtttgagtagctggcccagtgatacttggagagtgccattggtggtggttttttccaggtgcattcttggcatcttcccctctctattcctgaatgttttattaagaattttgaacatacacaaaaatagatggaacctctgtatacacatcacccagactcagcaaccatggccagttctgcccatccacttgtttctctcctttatcgctttgaagaaagtcccaagtatcacactgtttcatctgtaaatatttagtgtacatcgtatagtgtataacattgccaccagtccattagcacacataacaggaaatgaaagtagttatttcagatcaaatattccactgatggtgactttctaccaattgtcttataaatgtcataatttctctacagatatataaatgtttatatggatacacacacacacacacacacacacacacacacacacacacacacccccatacccatcttgtctaaaccagagtctaagactggtcttttaagtttcttaattcataagttcccccgcccccccatcccccaccatcttttcctttgcagtttattagctgaagaaccagattgcttgtttggtagtttcctagcatctgaattttgctgattgtttccccgtggtacagtttaacttgttcctctgtcccagatctgtacattggaagagggatctagaggtttgatccagttcaggtttaacttttttcctggccagtgtcatcagtggtattatgttctatcaagaggcacataacgtctggtggtctctccttttgtgataattagcagactgttgaagctcagtgcctcattccatcagtcaactaaggtttgcaaactcatgatattttgatgcagtcattgcttttcatttatgagctgaaccatgaaacttgcccttatctactattggtttcccagtggtacagtttatataggaaacgagaataaatgctgattcttcttttatgtacttactttcaaaataatgagttagttccttggtatcatgcaacagtgaccaattttgtgtgtgtgtgtgttttgttttgttttttaattgttaagacattcctatgccaaatacagcacgatagaagttgttagtcatcttggtaatataaaaacttttaggataacttacagtcatggatcgtgaccttccagggttctgagtgttgaaaatgacttttttccaatcttaaaaatatcacaacatctttgatgtgacttgggcagggagtgggtaagttaaggttgatttatgctgggcctcatctccagccacacttgtggccgcctaggagcattgatgacattcatctgaatcagcatgtttggtgatgatgccgagtcactaggactttggccaagatcttgatgtgcagaccccaggctgttccatcgctctaatttaaaccctttctccttcaggaggtgttggaattggccttctccatcctgtatgaccctgatgagaccttaaacttcatcgcacctaataaatatgaggtgagcagtgtggcgctgccttagacaacagagctatttctgtaactcttcagttggtggcaggaatgagcaaaacaggaaagtcccctgtggtgggtggctgcagtgtatattgaagcctaggaaggctttgagaagaaggtggcatttcaataggatgggaatgtctcaaaggaggagctgtggttgggggggcacccagatgaagcagcaggtatcattacataatgctggacctgaggttcctccaggcgcattgggtggctgccaaggatctgtcacactctggattgtttatctgtgagctgggctctccacattactcttcagcagcagccataggttgtcattacaaagataaggtcaactaggaatgagtcatttacctgggactgggaaaattctccccttttcagtttctctgtggtcagctacccaagagaacttgacagatccttcctcctaggggctcctggtcacatgttgtaatggatccagtgtggactttgaagccagatggaactggtccttctgacaagggccctgtagttccatctgcagcactggaagatactagatattaaatgagtgattgcatttgagaccctatgtgcctggtgagctctgagagccatcactgggaactagaggtgggacttctggcagaggagacacttgggcagggcctgagctgccgctagtggaatttggttgagaggaaatgaagaacaagcaagtggggaaccaggtgagcaacggtgtggaaaaaggaaaatggcagcagaggaagcaggaagagtcagggagcggtgggatcagaaggcttcctggtcaccccctcttagcatgagacccaccagttccatttctttagtatttactctttaatatgtattgactggattatttttaattttgttttcgggggggcggggcacaaaattgagatcccacagtgacttctgtttgtgtcttgcttcttttcacctaatacatatttcccttctctcgcttctgattttgggtaacttcaggtagatgatgccccagtactcagatctcattttgctgtattcgtttattgcatttttaggttctccttcatattattgtaaggagttgtaatataaaaccccttataaaaaccagatctcttgagaaagtgaaggatcacctcctaatttatctttgctatcattccaaatcagttttgcctatactgattagttccaaaaggaactgttgtgagccccatcagaaaagagaccttggcaggatctcctgctgaccaggggtcacgatgtgacattttgcaacttgctccccacagtactgcatctggattgatggcctcagtgcccttctggggaaggacatgtccagtgagctgaccaagagtgacctggacaccctgctgagcatggagatgaagctgcggctcctggacctggagaacatccagattcccgaagccccaccccccatccccaaggagcccagcagctatgactttgtctatcactatggctgagcctggagccagaaacgacggtacccaggagaagggattttgggcccaggagaaacacttacattctggtgccttgtcttttgcttgtacagaatctgtagtgattttggtggccagtaaatgccagccatttctcaaacccacctcggaccacccagagtttcctcttggtccctgtctactaagagtcatgaaggcagggtgctctgcccactccatcaccatgaagcctgggattgggccacgaggaacaaacagcagatgcccttgccttccagtccaagaaactgcttcttgaaatggatttaacaacagccactcaccttttcctcctgagcctgctctctgatcagctggatccccacgtgagcaacagctggcccaggaaaggctgcctgcagaggacaggtgtgttgggcgtgttgagagccttgaagtgactacctgtatcttagatctgagtacaagcctgaggcttttgcttttgtcttttttgatgagggctcactccagcttcatatggtgccaagacgttgctgcttctgaggttggctctaacatctctggtctttagagccaccagatctctctggcccatacagatatcagagcagacggaaatttctccctgcaagcgctcagtctcatcccagcaagtcaaagacctcctggccaagtcctgccctcttaagtctccaggaacgctgcagggaaaacccagctgaggcctgggcctagactgtggtgaggtcactagattctactgctcttcccccacattaataccttttccttcctcagagagaaatctcccctaacctgaattgcagccccctccagtttgctttcctttggccttccagaccccaggaagttggccttcccttcctagtgctatggtttctgccattggccatgatttcagggagctggctgaggccggctgaggccacacctgtgccagtggggcttccctggtgctgcagcacttgtaaaccacacacacagcctctctccctggacatacgttagcacattggcattcagtattggtggcctggcatggtaggtactacccaatgaagagtgtactatatattttcattactataggccatacttatacagacgtgtatatatatttatataagatctacctatcttaggatggaaccttggggaaaaataaaattgaggggaagtaaaaagtatgtaacacttccagttgtgagccaagattgtaaccagagagcagccaggagcttcctgtcagtaaccatgttttcaataaatactctttcatgtacaaa

SEQ ID NO: 904 - DNA, 13361 bp, Homo sapiens
gctttttcctgggatagcgatggagacgccgggcgcatcagcgtcgtccttgttgcttcccgccgcgtccaggcccccgaggaagcgcgaggcgggagaggctggggctgcgacgagcaagcagcgggtcctggacgaggaagagtatatcgaggtacgacctcggtgcggacgccggcgacttctgggcccatcctctgcttcaagctcctctcaggttccctctctcgggtgttgacactccgtctcctcgtggaagtggaggagccgggtgtggacggtcccacgagtcaagtaaacagggcagaggaagacgtctgtggtggaagaggctgtagtagtgttgtcagggaaaagagagagcggctctctttgtatgggacgggggtcagggaaagaagattttctgttaaagtgtgagtaggagtttgacaaactggaaggatggtggcaaagagggctttctaaagagcggtggcagcaagtgtgaatgctggggttcctggaaagagaccgcagttgtgacagcatctcgagtgagtggacctgcgtcgccccaccacacgcacacagaaggaggagctgaaacggggattggcggaagtcagtttggttttagacctgtttaattcgggacaccttttgggatatgtagatggatggctttaacggacggttgggtgcccagatatgcagctcgggagcaaggtctggctggaggtgcagacttgggaatctcaacttgtggtagtgactggctgaagttactcaggaaaaaggtttatttttattttattttttgagacggagtctcgctcgtcgtccaggctggagtgcagtggcgcgatctcggcttactgtaaccaacctctgcctcctgggttcaagccattctcctgcctcagcctgccgagtagctgtgactacaggtgcccgccaccacgcccggctaatttttgtatttttagtagtggtggggtttcaccatgttggccaggctggtctcgaactcctgacctcaggtgatccgcccgccttggcctctcaaagtgctgggattacaggcgtgagctaccatgccccgccaggagaaaggtttagattggaaatagaaagtcatgtgtggaatgaaagtgacaacacccacattggtctggcttgtggggagccagcaatggagaatgagaatgaccagttagcaagggcgagagagaagggtttcacggacttcagaagagtgtttagtaatgttagaggttgcagcatggctaccatatgggatgctcaaccccactagaaagtgccctcaagctccctcaatccagccccagtcattggggaagtagaatttgaaggaggttcagcaagttccttagcatgtacagcagtggacctgtgaggcaggagcacccagactgcagctccgactttcttttttcttttttttttttttttttgagacggtctcgctctgtcgcccaggctggagtgcaggggtgtgatcttggctcactgcaacctccgcctcccgagtttaagcgattcttctgcttcagcctcccacgtagctggaattacaggtgcctgccaccacgcccggctaatttttgtatttctagtagagactgggtttcaccatgttggccaggctggtcttgaacttctgacctcatgatccacctcccttggcctcccaaagtgttgggattacaggtgtgagccaccgcgcctggcctctgactttcattctgatctctccttgcagggcctccagacggtcatccaaagggatttctttcctgatgtggagaagctccaggcacagaaggagtacctggaagccgaggagaatggagacttggaacggatgcgccagattgccatcaagtttggctctgccttgggcaagatgtcccgggagcccccgccaccctgtatgaggaccctgtgggtggcggagaggggaaagcctgctgaactgtcgcttcaggctcactctaattcttatccccctctcttcccctagatgtgactccagccacatttgaaacccctgaggtgcatgcaggcactggagtggtgggcaacaagcccaggccccgcggccgaggcctggaggatggtgagtgagggtgccctctttaagtcacatggtcaggattgcctgggaatcttagcctgtgaggccctgagggggtggtccagagggctgcaggccacatcttgttcctgaggggtcttgcgtaaatagcagcctgtgaagtcaaaggacattggtctaggtggtagaacatctgggtccagctcccacacatggctcgcctctgtgaaatgggactctcaccagctcttgctggcttttctgctgtgttccagccctgccctgtgggcttcatggatgttggaaggccccttttgttactatcctgaagatgcctcagggcctctccatttgtttccttcatgttggtcacttcccagataactgcatggctcactgtgtttcttcctgtagatctctgcataggtgttacctgttcagagaaacttttcttgacctgccagtgtgaagtcacaacaccactggtgctctgtggcttccagcctggctttggtttttcatcacaagacattttattttatttaatttcattttatttttaattttttgacacagagtctcgctctgtcacccaggctggagtaaaatggtgtgatcccggctcactgcaacctccacctcccaggttcaagcaattctccctgccttagcctcccaaatagctgggattacaggcgcctgccaccactcctggctaatttttgtattttgtagtagagacgaggttttgccatgttgtcccggctagtcttgaactcctgacctcaggtgatctgtctgcctcggccccccaaagtgctggtattacaggtgtgagccaccgcgcctggccaagacataacgttttaaaggcatttctgtttatggtctctttccctaattggcatcccttgcacaagagcagaagctttgttttgctttcatctgtatgctccgtgttgggaacagcacatgtggtgttgtgggccttgcacagatacacatggaacagatgaaagagttgtcatcttcagcatgtttgctgggacacacagctctatatggtaacatcgtgacttgatgggggagtcggtttaggaaagggcactccgagtcctgttgaatgcaagtgttctgcacgccatgggacttctgcgttgtcaggccctcttttcatcagtagtagaatgtcagtgcatgtatagacaaacgagacactctttcttatcagtttgtagactccactgtgctggagtagcacagatgtgttgtgtgtttgcacaaacatgcaaacatgatactttttgctttacaatccagctttttcggccattaacacagtccttgttgtccttgaagcttgattatctgttgaaatgtagcttgtgcatcacagggcaatttgtagatttttttcttctccttttttttttttttcctatagagatgaggtttcattatgttgcccaggctggttttaaacttctgagctcaagtgatcctcccaccttggcctcccgaagtgctaggattacaagtgtgagccatcatgcctagccagtttgcagattttcaatacctgtacacctacatgccagtaaatataggaatccttttcagaacctaagtggtaggaaccatcatcatgtttacaggtgaggaaactgaggctcagaaaggcagtcacttctgcaggtctcagagatggtcagggtttcacttcttatctctctgagatgaatagagtttctgacccctgtcctcatcccgtgggtcttgagcttgtagccactgtgccttgtgcatagcctcacgtgtagcaggtggtcaggactgtcactagacttgaaggcagagctctccaggtggccccaccgaagtttgcaccaccacacgcagcaccagggcaccacctcagtgggagtaccactttccatggtggcagggttggtcggaggggggggtgtttggggttgtggcttagcacctgtgaggccccatccagaggactaagtcatatgagatccctggaattggggctcgctctcaggtcaggatgattaggcgatgaccacccacctgtagtacaggtaccaggaagagaagagtgggtaaggtaaggaaatcctagggagtgagggagagccccagggatttggaggcctggcacccacaggcctggcaccactttggtgggggaggagcctgcctgtgatcacgagctcttgctctaacacctgtattgctttctccagtctgaatcagaccacgtaattcccttggcatccagcacatgagcagagctggccctgaatctgtagggtaccacctgagggctctctgggcagtcagggtgggtggattctgcccccgtggggagtccttggcagtgtgggctttcatgggcagaagccaggaccaggggagaggattccagccctgcatgttgggggctatgattcctgggcctgggtgtcctcctctttcctgactgcaaagggtgctgtgttcctcctcccgcaacccctaagcaggagaggctggagaggaggaggagaaggagccgctgcccagcctagatgtcttcctgagccgctacacgagtgaggacaatgcctccttccaggagatcatggaggtggccaaggagagaagccgggcacgccacgcttggctctaccaggctgaggaagagtttgagaaggtgtctctggggtctggggtgtcacataggcgtaggcaccctctgtggtggttggggagccccagggccatgggtacaatgcccaggggcatctctgaccatcacttttccccatgtgattgcagaggcagaaagataatctcgaactcccgtcagcagagcaccaggccatcgagagcagccaggccagtgtggagacctggaagtacaaggccaagaattccctcatgtactatccagagggtaagtggcgggcctcgcagccaaatggggaggtgttgggtagagctgtgtgtgtctggctgtgtttggagcagccttccaggtgtgtatggccgtgcccccttgcagtttgggcttctgatgggtactggtctgtctaagggtggacaggtctgtgtgaggtcagcagtgagtgagaccctctccagcggcactggggcctgcgttctgctcaatgcttttgttcatctgggagtgacttggccgagaagcgagctcctcatgctccttaggctgctgcccttctgacacctgctgctacctttgcttcgtctgccaggtgtccctgacgaggagcagctgtttaagaagccccggcaggtggtacataagaacacgcgcttccttagggaccccttcagccaagccctgagcaggtgccagctccagcaggcagccgccctcaatgcccaggtgagcaggcgggtcagcagggccgcatgggccaggttggacagggctgcctgggggcaggcatgatctctcccatctctttgagcttggcagagctcagtgagtggaaccatctggggccctgtgcggcaggatcctgagtctttccttggccccagtgggcttccattgaacactgccttggtcacacacgttctgtaggtccagatctgtgccagctcccttgatggcaggggcaggagagaaaagggactgctgggagtgagcccaggctggcagctgcacgcccacacaccgggcagggaagccagagagccgcagagggagcccagccccagggggtggctggggtgggacaggccctgggttggcagagagcagaggctttctgagtctgggagcaagacgagtagatactctctgatggtgactgtggcagtcacagggttgaagtggggaaggcaggaagagactagagcataagcattgcctgtcatcagcattgcctgtcatcagcattgccccctgcaggggcctggcgtcagcatcctctggagttgctgggataggcgcagctcgagtggaggccctggcacctccctggatgggaggagggggctttccttgcttgggtacccactttgacaggccctcaaggtcttttggggggttggggcaggggccctccctctctttctccaagaaggctgccaaccccagagccccagccttgccctgaggagaggaagtgtttccagcatgttcccacgtgtttgcccaccggccagctgtcgagcgtgggctgcggtccccctgatgccagcctctctgcttgttccagcacaaacagggcaaggtgggccccgatggcaaggagctgatcccccaggagtcccctcgagtgggtggatttggatttgttgccactccttcccctgcccctggtgagaaaagtgcccactggcaagtgggtctactgctgggactccctgggggaggtgggcttctcagtcggccctggccactcctggcctctacctggcctgccccacaccttgtgtaactcagggacctggtctcctgtctgtacaaggccctagaggccaggtgtccaggctgcttggggccgtgggtgggctggactctcaggcagacctggcctgagacatcctgggatgacgtgtcctgtcctggtccttactgtgatgtcagtgggtgggggtgtgtgcacagtgcttatgagtctaagtctacctagcactgcagggagggaggcccagcacctcagtggaggtgaaactcaggtggtcttgtggcatgcgtgggtgtccctctgcactctggcctctgtgctcttgggtgctggtgctgtgtcacacgccagggcatgtgaaggcaccacaggtttgcctggggttctaggaggtttgggagccctggaaggcctgagtgtctcctcctgcgtggctgggggagacctcccagaggcttgtaggctaagcacatggctgtagggccttgagcctgcctcgggcctgctgggagcttggcatttccctttcggaggatggaggtgccagggttccagagtcctggggaaggagagagggctagctgcctgccttcgtattagctgggatgcacattgggtgaacaagctgtgactggaggggagggtggtggggagtcctctggcctgaggtggttttgggctctttgtctgcaggtgtgaacgagtccccgatgatgacctggggggaggttgagaacacacccttgagagttgaagggtcggaaacgccctacgtggacaggacacccggcccagcttttaaggtgggttgtggtgatgggggaactgtgtgcgaccggggtggacacctctggagccctgagtgcctgtggctcaggactgagcactgggatcggcccccagctgctgacgggcagagtgctggcttttctgaatgccagggtgctgaaggcaggtgtgggtgggtggacctgtcacagagggatttgggggtgtaagggctgagacaccaaggcagggagtggcttgggccctctggatcctggaggccgggtgctgttcatgaatgaggcaggatggtcacagacacgtgaggagctctgcaggcctgagggccataggacgaggctgtgtgcttgtagagaaggcccctggttacagaacacgattgggacacgctggattacacggctcaagcctggtgttgtaggagtggtcagggtggagtgtgtgaggcccggcacagaccaggggaggctcttcgtgggctgggtcagatacaacaggcctccccataccactgcgggcctttccccagaatacttagtacaggtaacccatgtccagacaaaacatggggagaggttctggttaccttggttctaaattgtctgggacacaaggataaccaaggcaaacgtgcgagagggataatgaagaggatgccgtgctgtccaatgtgagagcgcaaggcaagggctgaggtgcttctgaggtatgcctgccactgcttcccgagtctccaggccaacagtaaacagataaattctgaaacaaaccatgatccaagtcagaatttggggcccgataaagatggcaactcagattgcactgaatagcagagtatttagaaatgaagggagctgggtcctcaggatgtgtagcagcatacattgtggaaaggtgaaaaggttacatgtaaaaacaataaccataaaacaaccagaagaaaatagtggcgaatatttagtttgatttttgggttcaagtgattctcctgcctcaacctcccaagtaactgggactagaaaatagtggcgaatatttagtttgatttttgggttcaagtgattctcctgcctcaacctcccaagtaactgggactacaggcgcgtgccaccacgcccggcttatttttgtatttttagtagagatggggtttcaccatgttggccagactggtctcgaactccttggccagactggtttcgaactcctgacctcgtgatccacccacctcagcctcccaaagtgctgggattacaggcgtgagccactgtgcctcgcctcttttttttttttttttttttttttaacagatagggtttcactctgttgcccaggctggagaacagtggtgcaatcatagctgattgtaacattgagctcctgggctcaaatgaccttccagcctcagcctcctgtgtagctgggactaacagcatacaccaccatgcccagctaattttgtgtgtgtgtgtgtagaaatgaggtcttgtcattttgctcaggctggtctccaatgcctgagctcaagtgatcctcccaccttggcctcccaaagtgctgaggttccaggtgtgagccaccactcccagcctgtagtctaatcttaagttaggagggactttctaaacataaaagcaaaggaagaaatcacaaatgaaaataacaaatacagcagaaaatgttataaatgaaacaaatgtaaatgagtgaaaaaacatgtgcacagcgtagcacagttgacttgacacaaggtcttggcaagggtcttctgagtaacagcagcagaaaaggaaaatgagccccttgagagcaaaataggccacaggcacacggggaagcgcccgaaatacagagcgccgataaagacagagatgttcactctgataatcagggaaacactaaaacagactgctttttcctgagagattgtcagaggtcatggttttgggaggaacacgaagacaggtgaggagtgctgcgccttgggcaggtcaggtggggtttggggctttccaggggcttttagtgggaggtgatgggttgtgggggttttgtaggcaacaaagagaggctggcacccaccacagtggctttctgtgtgaggggctgcctggcgtgtggcaggcctggcgcagctacccacacacctgctaccttgtagatcctggagccaggccgcagggagcggctgggtctgaagatggccaacgaggccgctgccaagaaccgggccaagaagcaggaagccttgcggagagtgacggagaatctggccaggtgaggggccgcctggctggtggggaagtgcgagggtggctctggcctgctcctgttcggcccctgccctgaccgtgtggaggcatggcccacgcggcagagtccagggcaggtccgcggggttctgcagtgggtactgtggcagctcctctatccagagcatggccgcacatggacaggatgagaggccccctccatcttctctttcctccacgtcctctttgacccgtccctaagaggcatctttaggcgtgtggtcctgctgggagctttcatcagccctgtggagagagtcatcgttccccttggagaggggtggggactccaactctcagaggcctgggggtgcaccccagcccccacagccaagggcggtgctgctgtttgacctcaggtttgacctgagcgctgctgtttgacctcagggatcccccgcatttgctgccatgctggcagtaccatcctcctcagctcagagtgactgtgtctctgcccaggctcttcctgggagccaagggaggccctgctgccggcagctctcagcccacctaaccctgcctctctcacccattcctccaccccagcctcacccccaaaggcctgagcccagccatgtcgccagccctacagcgccttgtgagcaggacggccagcaagtacacagaccgggccctgcgggccagctacacaccatccccagcacgctccacccacctcaagaccccggccagtgggctgcagacccccacaagcacaccggcgcctggctctgccacacgcacccctctcacacaggacccggcctccatcacggacaacctgctgcagctccctgcccggcgcaaagcttcggacttcttttagagccaggcctgggctgggctcatagacgcttcacagagcctgcagggcagctgtacacccagcagaggactccagccttctcggggcccaggcctgggccagaagctgttgaccataccaggagtcactggagaaaggggctgtgctggggccagactggcacaaggcactcgtgcccacaccacaccccagggccttgccaagctgtttgctgtttaattggccccttgaactgtcattaaagaacacctaggtacagtctggggggttgcctctccatcttgctccccacacgagccctagccttgccctggggcctgcatcacgtctcaggactgcggggcttgaagcgaggggccccccaggtgaggaagctgcaggtggggcggctgtgggagcaccgggtgactggcgttgctttctgcggcactcggaacctgtgttctgagttgagctcacatcctgcagtgctttctgcttctctggggggatatgaaggagaaacggagcccttggaagttgtacccttaggttcccctgcggttctgggcccaggtctgcagcctccactctgggcttgccggctgtgaggtgcgctggttataggactgtgtgggggctgcatatcaggtgatctcagctatcaccttctcccagcacctggcttccagctcatggggtgggactatcccactcacccctctgctataggcactgcccatcttatgctgctggccctggcctcacctggtcacttccaccaacaggagctcccagataacagtgggttgctggacagatcaggctgggactcttaaggggtgggggacgtggggccttcagtgctttatcccctaggaaagggtgcacgttatcccaagggagcccccaggaagtggggagggaggggggaggagcatgtctaggtgctgaccacctggagcacttggccagcaagtgggccgcatgctttgggagcaatgggtgacccagcaggaagcacaaaagaccggccagtgtgccatcatcaagggctgctgagcagcttgaagagccactgggtggggagggcacacggggaggtctcagctggggctgcccctggaggacagggcagggaacttgagggctgaggacagaaatctcacatgactccaggaaatagaggaagaggaggatgctgagcgagggattgtgagggagtgggggtaggtcagagggggctgaactgcaggaagccagggggagtcgtggaccactggagctggccagccccagggcattggggacaaggccaggtcagagggagacagtgtgggcctggtgggtggaccctggcagaggccctcttgtcccccacaaggccaggccacactgtgattctgcctgtacctgagcatctgtcctgtgctcctaggccggagaccactgtgtgtcaggtggggcggttggctgagtcccagagaaaaacactcctcactgggcactcttgatgcttgcacacaccctgtggtttatttggtggtcagtaaggaacgtctttgctgctaagtggaagaaagctaatggaacgtaatcaaaatagtggtttaattgacgaattttacttgcacctgtgccttcttcagatcctacctgcctacttagtttacgtgaaggccgactgcaccatgccccccaaccccgacccccaccacacacaacggggccattgtcatgctaggtgcttgctttccccacctcagctccggagatgtgatggtctttggccctggaggtctcggccagcctgtcctccatcctgttctcgttctcgggcaccaccagcagccggtgctgggttttggctccaagcttgtggtcgggccggtggtcgggcctcaagcctgtcttggtgtccagtttgcactcagcgcggtacttgccctccccctccctcttgaaggaggcagaagacgtggctttgggcttggggggctgcagccacgagtggctgaggatctcatcgatgtggagccgctggctgacgtcgggctgcagcatgcggtagatgaggtccttgcactcgcaggtcaggttcttggagcgcgggaagtccacacggtgctccttctggatacgcagcatcttcctgatgtcggagtcgtcatagggcatggagccgcagaccatgatgtacaggatcacgcccaggctccagatgtcatacaccttgggctggtaggggatgctctgcagcacctcgggggctgcatatgctgccgacccgcagaaggtcttgctgaggatgatgcgcccattgctgtcccgcaggcagcgcttggagaagccaaagtcagacagcttgatgttgaagtccttgtcgaggagaaggttctcgcacttgaggtcccggtggacgatgtccaggtcgtggcagtacttgacggcggaggagagctgtcggaacatcttgcgtgccacgtcctcatgcagggctccctggcacttgatgaactcgaggaggtcgccctggacgccaagctccatgatgatgtagatccgtccgtcagaggtctcaaagatctcgtaagtcttgatgatggagccgtggttgacagttgccaggatgtccatctcccgaggaaggaatctctccacaaagtcagtaggtgttttcttgcggtcgatgatcttgacagccacattgaacttgaggcgctcagagtaggcagatttgacttttgcgtaggaacccttgccaagattgatgcctacgatgtaacccttcttccttaggactgtggcatcgtccatggtgccaggagcgactggcgccgctgccgtctacatccccccgtcatgtgggccagcaggcattgtcctcatttacactaccggaggcgtctggctgggct

SEQ ID NO: 905 - DNA, 919 bp, Homo sapiens
ggctgagggagaacagggtctctggaaccgtggaagccaggctggtctggcaggagcacccactccccgcccgctggaaggaagcctgtccccaggacaggactctggtggccctgctgctgctgcattggtttccctgtcacaagtcaagctggaggggaggcggcccacgtccagcctgtttgcatcacctggctgtggggactgaccctgcattggtctttgtcccactagggtgggtttcctgcagcttctttggctatgaagaaaagcacccccagggctgtgtccttggtgtggtaggacagttgtccctgacagtcacccagacaggcctgcatagcaccccagttacacagacagatttccacagcactgccttaccattgagcacatagttaaatctagggaaatcagtgcccagacatcaaagctagaaatgaaacatggtcagcaggagccttgcatgggcttctcttttgctggagcaagccaaaataataggaacggttttacattcctagtgccaggacccatctcgggtcgacaaaatctgaagacaagttaagggaacaggcagctgtttgaatagatcaattggatagtctaaggcagctctctggaccaagctgtaaaggagatacaatcgaaataatcactccggtaccacagtagacaggccttgaaggcactgggccccttttaatcggacttagcaagcattttttttgcctctgaccttctccttggaacaaaattagttaccagtagacttaggtgattgctgtactgcatgtaggcacataaccccaacctatataaacagtaagaaaattgtagcactttgagttggtctgctggaattatctccagccttctccctgtatccagttacagtgataaactcccttctttccta

SEQ ID NO: 906 - DNA, 1305 bp, Homo sapiens
caattaattgccagccttggttcacactgatgagtgtgctcattggagagactcagcatgcaaaagaaaagactcatcaatttgcagttatttaatttcacgaactgccggatggtggagtcagtagcagcggctgggccgcaacatggcgcctcccacctagacttccggtcaggaaacttccaccttcctccgatttacgtgggcctgcatgagcctacttctcttcttattctagtgccagtggcctctggagtcttggtccttcttactggaagtagccctcctctcctgttacagaggcaataattctccagccttccggtcgccgccaaagcctcctgcctaatcacttcctgtattgtctccctgcggctctttgcacagaccttgggctctgtcgtctctggattcttactgatctcttcctcttctcccaaccgccttgtcatgtctctttgagctatgtcaggaggaacggaagggcactttcttactacttttgttagccaaacggacaaactgtcccctcccctttgttgtaaccacacattcaaggcttccttcagtccagccccatctcccttttcgttgcctccctttcactactccaaatgagcttgccatactttaaacgggtcttgtactttcttatcccttctctggaatgtcatttctactgaagaaaatcctactcttccctcaagacccttctttaatcccctcttgccatggaaacttgagattttcattgaggagctaagttggaaaatataaactagagctgagtctctaccctggcactattgacatttggggccagattattcttggttggggagactgttctgtgcactgtaggatgtggagcagcctcccaggcctctacctgccaaaagcacactcccctttccccaagtggtgacaaccaactgtttccagacattgccagatgtcctgaggtgggagtgagggtgaacagaattgcctcccagctgggggctgctggactaatcaacaagaagtggcaaggactgcaggcaaattgcctcagcacttagatttagcactgcaaggccacttcgacaggtggtagtgatttgtgcgtctcatttcctattcttgattgtgacaaggttctggaggatggagacagctacccctgccacagttcccacaggctatgttgtacatagggcttcatatttaacatgtgagtgaatgaaacacatgagcccgagtgctcttcaggacggcaaggcctacatcaagatggtaaaccttcagttcttaaaaaaaaaaaaa

SEQ ID NO: 907 - DNA, 285 bp, Homo sapiens
gaaatatcaaacatctgaggagcttataattagttaagcatttacgtgtattaatatatcgtcatgtggacagttgagaggggagaaggcactagacaaatttaaaattgttagaaaccattggcaactgatattcagagcctaagttaaaagcaggatatgtctcaggagcaaatcttttgtgtaaatcctggtatttttactgcagacctttaaaatgacagacgcgggtgagtaaaaattacttctggaaatggatatgattaattaattcaattaattaat

SEQ ID NO: 908 - DNA, 274 bp, Homo sapiens
tttgtggttcaagcagtttgtgaaagatttgaaagctgcatacatttggggtcaccccaaaaagtcagccctgggccacgagcagtggcagaggaagcagttacagagaattaacagagttacataaaatttactcactttgtaggcaaatatttctaaccttggctccctttcttaaagatctatttccccagctttgttccccagctcaaaagcatttcccaacacgtggatctgctaccactggatctgccaaagcagaatcctctttttt

SEQ ID NO: 909 - DNA, 4048 bp, Homo sapiens
gcagtgacgagggaaacctctcgctgagggttggggcaaagtcacccctggaaatcgaaggggccgctggtggtctcttgaggtccaccagcctcaaatgcatctcttcagacggtgttgggggcacaaccctactccccgaaaagtcgaaaacccaattcagttcctgcgagtccctcttagaatccagaccgagcatggggagaaaactgagctctccgaccacacccagggacatgctgttgtcgcccacactgcgtcctcggaggcggtgtctggagtcctctgtggacgatgcgggctgtccagaccttggaaaggagccgcttgttttccagaaccgccagtttgcccacctgatggaggaacctctaggcagtgacccattcagctggaaactcccaagcctcgactacgaacgcaagaccaaagtggacttcgatgacttcctcccagctatccggaagccccagacacctacctccttggctggatcagccaaaggtgggcaagacggttcacagcgttcaagcatccactttgaaacggaagaggctaaccgttcctttctctcggggatcaagaccattttgaagaagagcccggagcccaaggaggatcccgctcacctgtctgactcgtcctcatcctccggctccatcgtgtccttcaaaagtgctgacagcatcaaaagtcgaccaggaatcccacgacttgcgggtgacggtggcgagcgaacgtcccccgagcggagagagccagggacggggaggaaagacgacgatgttgcgagcataatgaagaaatacctccagaagtaggaaccagttcaggtaaaagcaacaggctggggctattcttgggggaatgagagttcaccttgcagccttggggagagcaggtgccactactgtccttaatgccacaaccgatttctctagagaccaagatttttagaggttttagctgaagtcatgtgttgatggatgcaaagcttttcagaacccctctgctgggtacctctacttccttgtactttgaaatgcagacacatcagaaagtaagaggttcctgtgggataccgctaaagaaggtgccagatgtagccgggcgcggtggctcacgcctgtaatcccagcactttgggaggccaaggcgggtggatcacctaaggtcaggagtttgagaccagactggccaacagggtgaaacctcgtctctactaaaaatacaaaaaattagccaggtgtcttgacgggcgcctgtaatcccagctactcaggaggctgaggcaggacaatcgcttgaaccagggaggcagaggttgcagtgagctgagggtgccaccactgcactccagcctgggaaacaagagcaaaactctgtctcagggaaaaaaaaaaaaaaaaggtgccagatgtttaaagttacctcaccctactgtcattttcttttcttaatgtcattccacctgggtttgaaggagctgtgatggcgttctgtccacataatgacagaagatccgtggtgggatcacagacatgcaaagggccaagttggaagagaccttcagaatagtggagtccacttgcattgcatatggagagaaactgaggccctaggttcaggggggagggaacaagtacaaaaatcacagagcaacaatgcaggataagtaactacttgctgcccttcctccctctcctagcactcatcctgccactcatctggagtcaaggtaagaagaggaattcaggccgggtgcggtggctcacgcctgtaatcccagcactttgggaggccgaggcgggcggatcacgaggtcaggagatcgagaccatcctggctaacacagtgaaaccccatctccactaaaaaaaaatagcagagcgtggtagcgggtgcctgtagtcccagctactggggaggctgaggcaggaaaatggcatgaacccgggaggcggagcttgcagtgagccgagatctcgccactgcactccagcctgggcgacagagcgagactccgtctcaaaaaaaaaaaaaaaaaaaaaattcattgctaaccaaggcttacatttattgagaggacacatcagacagtcatttagtactcctgatatccccaagcagtggtgaatgttatttattcccatttaccaggttgacagactgagtatcagaaagattaaagtcacttgtacagaatcaccagggcataattgggtttccagctctagaatccctacatttatctttaaaagttttccctagggacacattccaggcatcttcatgagtgaaattagagctgtctgatagcgtatgagccttcgtaaatctcccagtcactgaatctcagaacttgctgcagctcaaggctctgatggtccagcgactgcacatggctctcagggtgcacctgctgccacccccaggcctccttgacccaaatgaggcacacgtcctctatttctttgagagacagcctcagcccatcaaaaagccattgccccttccgtggagacaggtttggactctatcagagcaaactaatttgacttaacatggccttctctctgctctcaattaccgagtaaagatctgatattcatttacattattatgctctcggggacacagaaagcagtttcaaaggccaagtaaagggcacacatccatgaggggaacagtccttagcagaagtcatcacagaacatcttgtctctgccattccgttttaaactcaagtcctccttccctaccctgagcaaggttcttctccaaggatgctagtttttcagctatacaatgcaacacctccaacgatgcaaatgcatggtgggctttggaaccaaacaagaccccccaaagctcagttctgccctgtaactagccattggaccctaggcaagtgatacagtctcaccaagcccctgtgtcctcagttggaaaacaggggtaagaataccaactacctaaagtaacgctgtggatttcatgagaatatgagagattcctggaatagagcatggcaccccatggatgcagtaaatgccaggttactttggaatttttggacctttgggaaatctatcccaactttttctccttctgccacctacactctgccatccctttctgtggagttgctacagtaacgccacctgggtatacagaattccaggccctccaccccattcattgtctctatcaaaatgtacccatcttcctggccaggcacagtggctcatgcccataatcccagttctttgggaggctgaggcaggaggatcacttgaggccaggagtttgagaccagcctgggcaacatagtgagtccccacctctacaagaaatacaaaataaaaaattagctgggtgtagtgacatgcacctgtaatcctagctacttgggaggctgaagcaggaagatcacttgaacccaggagctggaggctgcagtgagctatgattgcaccactgcacactagcctgagtgacaaagtgagaccctgcctccagaaaaagaaaaaccttacccatcctttgtcccattcatcaactctgacctatgtttgcttccagcctccttgaagctgcccttgaagacttcccgactctacaataacttggagacagagagactggccaggcctccccggtggccagagccagccagcatggccaccctcaagaggcgagatgagcccacagaggcatatcctgcggggatgctgggctcccagtgtggttggcctgaacaaaataaagtgttgactcctgggcatctgtgccttctctatggccttgctacctgggattccagagagttgatggggtgcagataggggtaggactgttagaatagaaccaacccaaactgtgtgtagtttggggtgtatacttctatttctcttcctacatgtctacatgccatgaccttcctcctcctcttcacttggccagtttcagctcacttcctccaggaagtctttcctgatatatcaaactgaaacaaatgctcctcctccatgctcccttaatcccc

SEQ ID NO: 910 - DNA, 163 bp, Homo sapiens
ggcgaagtgcttgccgtccagagaaagtccacagagagattagaacctgcttcctctcccctggcttctcggagtacaaatacatccccgctgtcgagggaaaagctgcccagtccttcagcggccctctcggagttcgtggaagggctccggaggaagagag

SEQ ID NO: 911 - DNA, 1127 bp, Homo sapiens
gatttttgtcttcagccgtgcaactatgttggggtcatcttattcctccttttcggcggtggacacaggcaaaaacattttaatacaatggaagtgcatcccctggcagccctgcggcagtcacagcctccttattggcaaggctgaagtcaaagccttgggctgcccagcctgaatgacactggcttcctgggatggttgttgctgtgtcagggacatttctgggtctctgccactgctactggtgctcttggtggagaaggccacagggtgttgctggggaggtggtgagccagaggtttctgggtctgcaccactgctgctgttgctctgggtataggggtaggccacagggtcatgctgggcggcttgttgagcctgggatgtttctgggtctccaccactgctgctggtgctctgggtggagaagaaggccacaggctgatactggaaggcttgttgagccagggacatttctgggactccaccactgctacaggtgctctgggtggaggggaaggccatggggtcatgctgggggccttgttgagccagggaggtttctgggtctgcactactgttgctggtgctctgcgtggagggggaagacacagggtcatgctggaaggcttgttgagccagggacatttctgggtgtatccagttgtgcaggtctcctcctcttgcatactctgttactaaataaataacagggtgatgctcaggggcttgttgagccagggatgtttctgggtcttcaccactgctgctgttgctctgggtggagggggaggccacagggtctttatgtatttaagcataaaggcaaggcttggcgcggtggctcatgcctgtcatcctaacactttgggaggctgaggcgggtggattgcttgatcccaggagttcaagaccagcctgggtaacatggcaaaacctcatctctatagaaaatacagaaattagccagctgcagtgcatgcctgtggtcccatctactcggaaggctgaggtgggaggatcacctgaacctggaaggtcaaggctgcagtgagccaagattgtgtcactgtactctagcctgtgttagagagccagacactatctcaaaataaaataaaataaaa

SEQ ID NO: 912 - DNA, 1115 bp, Homo sapiens
agccgagcaacgatgttggggtcattttgatacatgcttcttagtggggggcacaggctggaacgttttgatacaatggaagtgcatgccctggcagccctgtggagctcacagcctccttattggcaaggctgaagtcaaagccttgggctgcccagcctgaatgacactggcttcctgggatggttgttgctgtgtcagggacatttctgggtctctgccactgctactggtgctcttggtggagaaggccacagggtgttgctggggaggtggtgagccagaggtttctgggtctgcaccactgctgctgttgctctgggtataggggtaggccacagggtcatgctgggcggcttgttgagcctgggatgtttctgggtctccaccactgctgctggtgctctgggtggagaagaaggccacaggctgatactggaaggcttgttgagccagggacatttctgggactccaccactgctacaggtgctctgggtggaggggaaggccatggggtcatgctgggggccttgttgagccagggaggtttctgggtctgcactactgttgctggtgctctgcgtggagggggaagacacagggtcatgctggaaggcttgttgagccagggacatttctgggtgtatccagttgtgcaggtctcctcctcttgcatactctgttactaaataaataacagggtgatgctcaggggcttgttgagccagggatgtttctgggtcttcaccactgctgctgttgctctgggtggagggggaggccacagggtctttatgtatttaagcataaaggcaaggcttggcgcggtggctcatgcctgtcatcctaacactttgggaggctgaggcgggtggattgcttgatcccaggagttcaagaccagcctgggtaacatggcaaaacctcatctctatagaaaatacagaaattagccagctgcagtgcatgcctgtggtcccatctactcggaaggctgaggtgggaggatcacctgaacctggaaggtcaaggctgcagtgagccaagattgtgtcactgtactctagcctgtgttagagagccagacactatctcaaaataaaataaaataaaa

SEQ ID NO: 913 - DNA, 1144 bp, Homo sapiens
gatttttgtcttcagccgtgcaactatgttggggtcatcttattcctccttttcggcggtggacacaggcaaaaacattttaatacaatggaagtgcatcccctggcagccctgcggcagtcacagcctccttattggcaaggctgaagtcaaagccttgggctgcccagcctgaatgacactggcttcctgggatggttgttgctgtgtcagggacatttctgggtctctgccactgctactggtgctcttggtggagaaggccacagggtgttgctggggaggtggtgagccagaggtttctgggtctgcaccactgctgctgttgctctgggtataggggtaggccacagggtcatgctgggcggcttgttgagcctgggatgtttctgggtctccaccactgctgctggtgctctgggtggagaagaaggccacaggctgatactggaaggcttgttgagccagggacatttctgggactccaccactgctacaggtgctctgggtggaggggaaggccatggggtcatgctgggggccttgttgagccagggaggtttctgggtctgcactactgttgctggtgctctgcgtggagggggaagacacagggtcatgctggaaggcttgttgagccagggacatttctgggtgtatccagttgtgcaggtctcctcctcttgcatactctgttactaaataaataacagggtgatgctcaggggcttgttgagccagggatgtttctgggtcttcaccactgctgctgttgctctgggtggagggggaggccacagggtctttatgtatttaagcataaaggcaaggcttggtgcggtggctcatgcctgtcatcctaacactttgggaggctgaggcgggtggattgcttgatcccaggagttcaagaccagcctgggtaacatggcaaaacctcatctctatagaaaatacagaaattagccagctgcagtgcatgcctgtggtcccatctactcggaaggctgaggtgggaggatcacctgaacctggaaggtcaaggctgcagtgagccaagattgtgtcactgtactctagcctgtgttagagagccagacactatctcaaaataaaataaaataaaataaaataaaaaaagaaa

SEQ ID NO: 914 - DNA, 1729 bp, Homo sapiens
ttttttttttttttttaagtggcagtactgcagggctgacagaatctgcctgaacatggtccgggcctcctcttcctcctcgatgtggccatagtggtatatctggtggtgcaactctcctcctctggtttactccctcaccacctggaagagctgaatgatatttgggtgatggaaagtcttcaagatggcaacctgggtcccagttggcctatgctgagccagttccctatcagatggtgtctatgaactgatagttttgtatctccttgtcaagtgaggtggagggtgatccctgctccatggtgcctcccaactatactgactacaaatcctgcctctaaaagctatgctgtgatgcacagcactaactgtgctagctaggctaaggccactgtcggtgacaataccccaggctccaaaccctctgggtctgagggccgttcccttccacggttacacagattcccacccctccctgcccatctacccaccatgcggggaaggtgccaaggagtagacacatggacagtcgttctggtgtctcctggtggggccagactgggcaccatggctgcaagcacagacagggcagagaagaggccagggccacgtggtggagctgggtctaaaacaggactcccaagggcaaaggccctgcccagacttggcacccacagtcttctgctgaatgctatgagcccgcttcagtgaaagagggaaggtggaaacttcaatgtagagaggacaagtgggatccccaggaggaagggtctgtggtctgatagtggaccgcttcttctgttttgtttgttccaaaacaaggtaggtggccatgggataactgaataatttttctttgattgccacagataggttctcagcctggaatcccatggccaccaaaagctgggttgttttgggattcaggtggtccaggatttgttcttcatgttgtcagaggcaactcctgaccactgttcacccacgggtccctcataacttcttctagtgtggtctgctccctggggtctactgttaatagttttttaatgaggcttttaagacctcaggaaaagtagactggggaaaaatagcttccactttaaatttttgctgagaggaccctaatgctgcatgagcagaagggcagaaccccagccaccatgtggtataaaattactctgaggctctgaatatccatggtggcacattggtagcactggcctaggatacgtttcagggccatgtaggggttaagtgctacaaagggctgtcagcttctgcccatcatggaatgtggtaccaaagccgaagtctgcgatcttaacgttaccgtcctcatcaaggatgatgttttctgggttcaggtctctgcgcaatttgctatggcactactgcatggccgacagaatctgcctgaacatggtctaggccttctcctccctcatgaggccatggtggtgtattggttgcgtgggtgtcctcctcttgcatactccgttactaaataaataactggtgttgggggtgtcaatcacttgatacaaccgtacaatattgaagtgacagagtaactttaaaatacttatcactctctggagagtgatgccaagggagccagccttggggatgattttgatggccatttgggtcccaatcagcatgtgatcctggacctcactgaacgtgccacggccaatggtgtccaggattttacagttctgga

SEQ ID NO: 915 - DNA, 696 bp, Homo sapiens
agtgtgcccagtgccacaccgtggaaaagggaggcaagcacaagactaggcctaatctccaaggtctcttcgggcggaagacaggtcaggctgttggattctcttacacagacaccaataagaacaaaggcatcacctggggagaggatacactggtggagtatttggagaatcccaagggtatggaagaaaaatgatctttgccggcattaagaagaaggcagaaagggcaggcttgatagcttatcttaaaaaagctactaatgagtaataattggccactgccttatttattacaaaacaaatgtctcatgactgttttatgtgtaccatactttaatagatctcatacaccagaaatcagatcataaatgacagaatattttgttgggcagttgtgatttaaaactaagactagcttgtggttaaatgttcagtttttgaattttaatagtaattccaattcagaacatggtatcactgtttaccccttctaaaaatatgattagactttgttagtaatgttcaacttctcacaaagatggtgagtgccatcttaaaacttaatagaggccgggcgcagtagctcatgcctgtaatcctagcactttgggaggccgaggcgggtggttcacttgagttcaggagttcgagaccagcctggccaacatggtgaaacccccgtctctactaaaa

SEQ ID NO: 916 - DNA, 5304 bp, Homo sapiens
ttcccaccgcatcgtccgcctcagccagaaccttctggtccccgcccccggatagggacccaggaggcccaagccccttcttccggcggggagtgggagcctctcgcactctcggcagctccagaccctcgggatctccgtttacagttcaggacctcagctgcactttggcgctaacgccctgtttcccaggtggggaaatcaagagatggggttccttggaatgggaagtggggtgtgaaggggaaacctttttggccaggagaatcaggtgttccatatctgggagctattgagcagcttgagcagactttgtaggttcaagcccttctggagtggttgacagtgacttctgggcggtggggatggggtgaaccatctttaaactttgtgcgaagaggtgcagggacctaggtttagaagcgctctcgtcccatgttggttctgccgaatatttaggctgactcctgacctcaagtgattggcccgccttggcctcccaaagtgctgtgattgcaggcctgagccaccgcgccgcgacctaggctggacatttgacaaagacttttacttctacctctacttcctcttagaagatgtggcaagaaaaggatccggggggcccgggcccggtggctcacgcctgtaatcccagcactttgggaggccgagacgggcggatcacgaggtcaggagatcgagaccatcctggctaacacggtgaaaccctgtctctactgaaaatacaaaaaaattagccgggcgtggtggcaggcgcctgtagtcccagctacgggaggctgaggcaggagaatggcgtgaacccgggaggcggagcttgcagtgagcggagatcgcgccactgcactccagactgagtgacagagcaaggctctgtctcaaaaaaaaaagaaagaaagaaagaaaaggatcctgggattaaatacttttttaaatcccatattctgggattaaaaatatgcttgacagcattcataccctccgcccaccttgccatggtggtgtaccacagtagtccctctcttggatatgtgctctgaaggtcaagatatcaagcaccagaagcctttcacagggtgtttggaatagataactgtcccttgggtgtccctttctcattctaaggcagcccagatatttgaacacttagtactttgcaaagagcctacatagatcatgagaaacatactagttggagaaaatcaacaaatccccctatactaaccattgtcaggagcaggtcttctggtctgaaatgtcaccaacgtttttttcttttttgagacggagtctccctctgtcacccaagctggagttcaatggcttgatcccggctcaccgcagcctccattcaagtgattctcctgcttcggcctcctgagtacccgggattacaggcacccaccaccacgcctggctaatttttgtatttttagtagagacggggtttcaccctgttggccaggctggtcttgaactcctgacctcaagtgatccacccacctcggcctcccaaagtgctgggattacaggtgtgagccactgtgcccggccaacagttctttttttaaaacgaacttttctatctcacaaacggcggtgaaggtgtcaaaattttcacagtatttctggggcaattactggataggatgagatctgctgctatcttctgtgggagaagaaggggcagagaaatacacttggctagaaagaaaagggacctgctatgcccactaacaaaataggtacgtgctaaaaaaaattagcttctgaatttagtaaaacttcttatatactggcaatgttgaaggagaatgatggaaaattctaattttacttgcataaattttcagttagcaatatcctcacagccctttttaatcttcaaaggaaaaagaaaattaaggtcttatggaaccagtaggtcttccatagatggaaaacaaacaaatcagaaaaacaaatttaaaaccacacccacacctagaaaaacaaaaatctttaacagttttttgactggactttggaagtgttttctcccagcctggtgtagctcctctgaggtggtatataaataacccaggggtctgcaagttgctcccttgtgctagaaaatgcagaggcctttggggccaggagatgatctcagtaatgaatagtgaaagctagagttgtttgaaaggaatagcataagaaattctcaaaatagacaatgcaagagggcttatataaatgcagattgctgggtcccacgtggagtttgttcctgttggtctgaggtggggcccaaaaatgtgcatttctgcaagtttccaaatgatgctgaagctgctactacagggttcatacatcgcgaacctcaaaatatatatatatatatatatatatatatatatatatatatatatatataattttttttttttttttttttttagatggagtcttgctctttcacccaggctggagtgcagtggtgcgatcttgactcactgcaacctccgcctcctgggttaaagcaattctcacacctcagcctccccacagagctgggactacaggcatgcgccaccacgcccggctaatttttgtatttttagtagagacagggtttcaccatgttggccaggctgttctggaactctgacctcaagtgatccgcccgcctcagcctcccaaagtgctgggattataggcatgagccactgtgtccagccacaaatatttttaagacatgacttttctgagcttcttctaatctcaagtaataaggtctcatcatgaagtcccagaagcttctgtcacctcagaagataaagactctgtcattagcagctaacaacacagcataggtcctaacagtggacctatattcatttcagacaaatccattgcctcatctataaaatgggttaagacctacttccaaaggcttgtgaaaaagtttaatataaagttttagtacacatagcagttgccagatcaatacttgtaatcattccctacttccctttattagaattactaatatctaggctgggcgaagtgggtcacgcctataatcccagcactttgggaggccgaggcggtggatcacctgaggtcaggagttggagagcagcctggccaacatggcaaaactctgtcactacaaaaaaatacagtgagccaagatcgctccactgcactccagcctgagtgacagagcgagactcttgtctcaaaaaagaaaaaataaaataaaataaaataattactaatatcctaacacctgttggaatctattcatgggaactatagaacaagtttatgtctatagtgagacagagatgggaatttgaaaggccatgctctcatgaaaagcatgtcagggaaattccatgctctgatttccctcctttaggactgtcaatggcaggataccagctctggtcaccatggaccccactggatgagagtttccaatggctgcggcacacgacacctacaccttcctccaagcacccattcaaggcctccccctgcttcccacacacaccgtccgaccttgaagtgcagctgtgctttcaagaggtcactctagtcctagacagcccattcctggaatctggagtgagtcccaagttaccctgccacacatcagagttgcgcacgatgaacaacaaaggactggtcaggaagccccagcccatccgcctcagtggagtagattctgtctttggcagggttatcacagctcagccaccaaagtggaccgggactttcagagtttcagacaagtcagccttttgcaaaatcattagcagggagcaccagtggcccattggactgaaggagcctcagattcagatgacagtcactatgtgcaaacagatgctgcgctctatcctcttgctgtatgcaacttacaaaaagtgcacctttgccttgcagcactccaagtaaagggtcctcatttgatccccatttactcacaccatgccctttggtatgtacctaaagcttacagaaacctgtccatgtaaatgaaactgtgacattgtcccagccatcttgcttttgtttcaagcagtgatgattcaggagcccctttcatcccttcccctccaaaaaaggaccaatgatagagaacaaggaagaacattcccattgtaaggttgaaccatttagagtcaaactagcattgacatgtccatgtgataaccgttaaacaaatgatataaaccaatgagcctagtgtgaactcacataaacacctacaaccacaatgaattggggggaaaaggggtgtagaggagaaagatgtatggatttctatgtaccaggggatgtcaaaaatctatatatataggtcaaggattactttaaaacctcccccgaccaaaacaatgaaaataagaaaaaaaccctaaccaaccacaccctaataccactagagtgtacaaaagtgggtagaaatactgatattaaacaatacttacagcctggcaagaaagaacttggtagcagcactgaagctaggctttctggtaggctacatggaactcatgagtctccattttagctgaaatgtactcctaatgtaattttgtagcatttttttggtttttggagacagggtttcattctgtcatcacggctggactacagtagcatggtcttggctcactgcagcctcaaactcccaggctcaagtgatcctcccgcctcagcctcctgagtagctgggactacaggtgcgggccaccatatctggctaatttttgtattattattattttttgagatggagttttgctcttgttgcccaggctggagtgcagtggcgccatctcggctcaccgcaacctctgcctcccaggttcaagcaattctcctgcctcagcctccctagtagctgggattacaggcatgtgccaccacgcccagctaattttgtgtttttagtacagacagggtttctccaggctggtcgggctggtctcgaactcccgacctcaggtgacctgcccacctcagcctcccaaagtgctgggattataggcatgagccactgcgcccggccattaatttttgtatttttttttttttagtagagatggagtttcaccacattgcccaagctggtcttgaactcctggactcaagcaatgccttggcctcggcctcccaaagtgttgggattacagcggtgacccacaatatctggccttagtagcgttcttgtaactaggttaggtataactcagaaaatggaaataaacattacatatacaaagttaa

SEQ ID NO: 917 - DNA, 945 bp, Homo sapiens
agtgtgcccagtgccacaccgtggaaaagggaggcaagcacaagactaggcctaatctccaaggtctcttcgggcggaagacaggtcaggctgttggattctcttacacagacaccaataagaacaaaggcatcacctggggagaggatacactggtggagtatttggagaatcccaagggtatggaagaaaaatgatctttgccggcattaagaagaaggcagaaagggcaggcttgatagcttatcttaaaaaagctactaatgagtaataattggccactgccttatttattacaaaacaaatgtctcatgactgttttatgtgtaccatactttaatagatctcatacaccagaaatcagatcataaatgacagaatattttgttgggcagttgtgatttaaaactaagactagcttgtggttaaatgttcagtttttgaattttaatagtaattccaattcagaacatggtatcactgtttaccccttctaaaaatatgattagactttgttagtaatgttcaacttctcacaaagatggtgagtgccatcttaaaacttaatagaggccgggcgcagtagctcatgcctgtaatcctagcactttgggaggccgaggcgggtggttcacttgagttcaggagttcgagaccagcctggccaacatggtgaaacccccgtctctactaaaaatacaaaaattagccaggcgtggtggtgggcacctgtaatcccagctacttgggaggctgagagagaactgcttgaacccggaaggcagaggtgcattgcagtgaaccaagatcgcgccactgcactccagccagaatgactaagcaagactccatctcaaaaaaaaccccaaaaaataaaaacaacaacaacaacaaaaacttaatggagattggttttatatttagatttatttaactggttatgtg

SEQ ID NO: 918 - DNA, 3503 bp, Homo sapiens
ttgtttttttttttgagacggagtcttgctctgtcatccaggctggagtgcagtggcacaatctcggctcactgcaagctccacctcccaggttcacgccattctcctgcctcagactcctgagtagctgggactacaggcgcccaccaccacacccggctaattttttttttttttttttttttgtatttttagcagagacagggtttcactgtgttagccaggatggtctcgatctcctgacctcgtgatccgcccacctcggccccccaaagtgctgggaatacaggcgtgagccaccatgcccggccgacaaattgatttttgacaagggtgccaaaataatttcagtggtgaaaggaccatcttttcaacaaatggaactggaaaaactggatatccatatgcaaaagaatgaagctaaatccttaaaatacactatacacaaacattaactcaaagtggatcaaagacctaaatttaagaaaataagagaaaaccttcatgaccttggattcggcaatggtatcttaagcataacaaccaaaaggacaagcaacaacaacaaaaaaagtaaagagtgggttgtccggctttggagtggcaaccttcgtggccccagggactaaaaagagaattaaatacaagtgatgttgagaaaagcaagatttttgttcagaagtgtgcccagtgccacaccgtggaaaagggaggcaagcacaagactaggcctaatctccaaggtctcttcgggcggaagacaggtcaggctgttggattctcttacacagacaccaataagaacaaaggcatcacctggggagaggatacactggtggagtatttggagaatcccaagggtatggaagaaaaatgatctttgccggcattaagaagaaggcagaaagggcaggcttgatagcttatcttaaaaaagctactaatgagtaataattggccactgccttatttattacaaaacaaatgtctcatgactgttttatgtgtaccatactttaatagatctcatacaccagaaatcagatcataaatgacagaatattttgttgggcagttgtgatttaaaactaagactagcttgtggttaaatgttcagtttttgaattttaatagtaattccaattcagaacatggtatcactgtttaccccttctaaaaatatgattagactttgttagtaatgttcaacttctcacaaagatggtgagtgccatcttaaaacttaatagaggccgggcgcagtagctcatgcctgtaatcctagcactttgggaggccgaggcgggtggttcacttgagttcaggagttcgagaccagcctggccaacatggtgaaacccccgtctctactaaaaatacaaaaattagccaggcgtggtggtgggcacctgtaatcccagctacttgggaggctgagagagaactgcttgaacccggaaggcagaggtgcattgcagtgaaccaagatcgcgccactgcactccagccagaatgactaagcaagactccatctcaaaaaaaaccccaaaaaataaaaacaacaacaacaacaaaaacttaatggagattggttttatatttagatttatttaactggttatgtgaatatatttaaatactggggaaatttcctcactgtcttagaaccaagcaagattcaactgtgtttggtgttcatttgcctcttaaaggctaggattgaaggaaaataaggtagcaatgtctagtttattatttaacacttctcacattttatacatgatctataaggtcacatgcttttaaaatagtaacaagttaaacttcactcttgaattctttacactctaactcaaactaagttatgattcaggattgtctttaaagaaccattcgaaaacataaaactgctgcgtatttgtgattgggaatggtgcttttgccaacttaaaatgattagaatacacactttaaaactatgtgtgatcatacgactcaaaataattaagaaaatcacagatcaaaaaaataataaaataacataaaaaataaggccagatgtggtggctcatgcctgtaatcacagcactttgggaggctgaggtaggcagatcacgaggtcaagagatcaagaccatcctggccaacatgtgaaaacctgtctctactaaaaatacaaaaattagttgggcgttgtggcacaggcccatagtcccagctacacgggaggctgaggcaggagaattgtctgaacccgcaaggtagagattgcagagagtcgagatcgtaccactgcactccagcctggtgacagagctagactccatctccaaaaaaaaaaaaaaagataaatttgactttatcgaaactaaatacttttgtacatcaaaggacactatcaagggagtgaaaacccatagaatgggagaacatgtttgcaaatcatatgtctgataagggatcaatatccagaatatataaataactcctatacctcaacaatgacaaaaacccaatttaaaaacgggcaaagggctgagcacagtggctcgtgcctgtaacaccagcactttcagaggcagaggtggttagatctcctaagctcaaaagttcgagaccagtctgggtaacatgacgaaaccttatgtctaccaaaattgcaaaaaattagcggggcaccatggtgcgcacctgtggtcccagctactcagaaggctgacatgagaggatcgcttgagcctcggaagtggaggttgcagtgagccaggatcataccactgcactccaacttgtgtgacagagtgagacctcatctctgaaaaacaaaacaaacaaaaatgggtaaaggacttgaatagacatgtctacaaaaatatagaaatggccaagaagtatgtgaaaagatgcttaacatcattagtcattagggaaatgcaaatcaaaccacaatgaggtatcactccgtactcatcaggataattataattaaaaaatagggccaggagaggtggcaggtacctgtagacccaggtactcaagaggctgaggagggaagactgcttgagcccaggagtttcaggctgcagtgaactatgatcacgccactgcactgcagcctgggtgacagagcaagatcctatacataaaaaaaaaaattaaattattaattcattaaaagcaaaattattattattattattattattattattattattattattattattattatttgagacagagtctcgctctgttgccccggctggagtgcagtggcgcaatctcggctcactgcaagctctgcctcccgggttcataccactctcctgcctcagcctcccaagtagctggtactacaggcgcacaccaccacgcctagctaattttttgtatttttagtagagacggggtttcaccatgttagccaggatggtctcaatctcctgacctcgtgatctgcccgcctcggcctcccaaagtcctgggattacaggtgtgag

SEQ ID NO: 919 - DNA, 1729 bp, Homo sapiens
ttttttttttttttttaagtggcagtactgcagggctgacagaatctgcctgaacatggtccgggcctcctcttcctcctcgatgtggccatagtggtatatctggtggtgcaactctcctcctctggtttactccctcaccacctggaagagctgaatgatatttgggtgatggaaagtcttcaagatggcaacctgggtcccagttggcctatgctgagccagttccctatcagatggtgtctatgaactgatagttttgtatctccttgtcaagtgaggtggagggtgatccctgctccatggtgcctcccaactatactgactacaaatcctgcctctaaaagctatgctgtgatgcacagcactaactgtgctagctaggctaaggccactgtcggtgacaataccccaggctccaaaccctctgggtctgagggccgttcccttccacggttacacagattcccacccctccctgcccatctacccaccatgcggggaaggtgccaaggagtagacacatggacagtcgttctggtgtctcctggtggggccagactgggcaccatggctgcaagcacagacagggcagagaagaggccagggccacgtggtggagctgggtctaaaacaggactcccaagggcaaaggccctgcccagacttggcacccacagtcttctgctgaatgctatgagcccgcttcagtgaaagagggaaggtggaaacttcaatgtagagaggacaagtgggatccccaggaggaagggtctgtggtctgatagtggaccgcttcttctgttttgtttgttccaaaacaaggtaggtggccatgggataactgaataatttttctttgattgccacagataggttctcagcctggaatcccatggccaccaaaagctgggttgttttgggattcaggtggtccaggatttgttcttcatgttgtcagaggcaactcctgaccactgttcacccacgggtccctcataacttcttctagtgtggtctgctccctggggtctactgttaatagttttttaatgaggcttttaagacctcaggaaaagtagactggggaaaaatagcttccactttaaatttttgctgagaggaccctaatgctgcatgagcagaagggcagaaccccagccaccatgtggtataaaattactctgaggctctgaatatccatggtggcacattggtagccctggcctaggaaacgttccagggccatgtaggggttaagtgctacaaagggctgtcagcttctgcccatcatggaatgtggtaccaaagccgaagtctgcgatcttaacgttaccgtcctcatcaaggatgatgttttctgggttcaggtctctgcgcaatttgctatggcactactgcatggccgacagaatctgcctgaacatggtctaggccttctcctccctcatgaggccatggtggtgtattggttgcgtgggtgtcctcctcttgcatactccgttactaaataaataactggtgttgggggtgtcaatcacttgatacaaccgtacaatattgaagtgacagagtaactttaaaatacttatcactctctggagagtgatgccaagggagccagccttggggatgattttgatggccatttgggtcccaatcagcatgtgatcctggacctcactgaacgtgccacggccaatggtgtccaggattttacagttctgga

SEQ ID NO: 920 - DNA, 130 bp, Homo sapiens
aaaaaaaaaaaaaaaaacaaaaagaaaaaaaaaaaaaaaaaaaaaaaaaaaaaaaaaaaaaagaaaaaataaaaaaaaaaaaataaaaaaaaaaaaaaaaaaacaagaaagacaaaaaaaaataaaaaga

SEQ ID NO: 921 - DNA, 143 bp, Homo sapiens
aagaaaagaaaaaaaaaaaaaaaaaaaaaaagaaaaaacaaaaaaaaaaaaaaaaaaaaaaaaaaaaaaataaaaaaaaaaaaaaaaaaaaagagaaacaaaaaaaaaaaaatagaaaaaaaaaaaaaaaaacaaaaaaggag

SEQ ID NO: 922 - DNA, 151 bp, Homo sapiens
aaaaaaaaaaaaaaaaaaaagaaaaaaaaaaaaaaaaaaaaaaaaaaaaaaaaaaaacaaaaaaaacaaaaaaaaaaaaaaaaaaaaaaataaataaaaaaaaaagagaaaaaaataaaaataaagaaataaataaaaaaaaaaaaaaaaa

SEQ ID NO: 923 - DNA, 151 bp, Homo sapiens
  misc_feature (4)..(4): n equals a,t,g, or c
  misc_feature (45)..(45): n equals a,t,g, or c
  misc_feature (89)..(89): n equals a,t,g, or c
aaanaaaaaaaaaaaaaaaaaaaaaaaaaaaaaaaaaggaaaaanaaagaaaaaaaaaaaaaaaaaaaaaagaaaaaaaaaaaaaaaanaaaaaaaaaaaagaaaaaaaaaaaaaaaaaaaaaaaaagaaaaagggaaaaaaaaaaaaaaa

SEQ ID NO: 924 - DNA, 118 bp, Homo sapiens
ggattacatactgttgccaactgaaggttggaataaacttgtcagctggtacacattgatggaaggtcaagagccaatagcacgaaaggtactgtttaataataactgactataaata

SEQ ID NO: 925 - DNA, 5088 bp, Homo sapiens
  misc_feature (5)..(304): n equals a,t,g, or c
  misc_feature (3943)..(4892): n equals a,t,g, or c
tattnnnnnnnnnnnnnnnnnnnnnnnnnnnnnnnnnnnnnnnnnnnnnnnnnnnnnnnnnnnnnnnnnnnnnnnnnnnnnnnnnnnnnnnnnnnnnnnnnnnnnnnnnnnnnnnnnnnnnnnnnnnnnnnnnnnnnnnnnnnnnnnnnnnnnnnnnnnnnnnnnnnnnnnnnnnnnnnnnnnnnnnnnnnnnnnnnnnnnnnnnnnnnnnnnnnnnnnnnnnnnnnnnnnnnnnnnnnnnnnnnnnnnnnnnnnnnnnnnnnnnnnnnnnnnnnnnnnnnnnnnnnnnnnnnnnnnnnnnnnntgagatagaatctcactctgttgcccaggctggggtgcagtggtgcgatctcagctccccacaacctctgcctccagggttcaagcaattctcctgcctcagcctcctgagtatctgggattacaggcatgcaccactacgcttggctaatttttgtatttttagtagagacggggtttcaccatgttggccaggctggtcttgaactcctgacctcaggtgattcgcccgccttggcctcccaaagtgctgggattacaggcatgagccaccgtgcctggctgaaagttcattttcaatagcatagtccagaccattttttttctaaatgtgctaccagaatcaaagaaataataacattccattaaaacaaataaaatggcattaaattaaatgttctgcataatttaagagccctgaccaattttagtcttttttttttttttgagacagagtctcactgtgtcgcccaggctggagtgcagtggtacgatcttggctcactgcagcctccacctcctgggttcaagtgattctcctgcctcaacctcccgagcagctgggattacaggcatgtgccaccatacctggctaatttttatatctttagtagagatggggtttcaccatgttggccaggctggtctcaaactcttgacctcaggtgatctgcccgcctcggcctcccaaagtgctggcattacaggcatgagtcactgcgcctggcctagtctattattaacaaataaaaattttaatacataaaaatggatggatattttctagagccttaattaagtaattcactccaaatgtcttttttttttttttttttagctagtaagtggagacactttgaaacatggtgcttaaaaaaaaacacactacctacctggtgggctgtttcatggtgaaataacttattctgtataatttgaatgcaattcagatactatgtagatgttaaaaagctaagttaacataaaatgtacatcatgaaacgtcaccttacttgacggcattaatacattttttccactaaaatacttgtaaccatggccatcagtatgaagaaaaattttaaacacgatgaaaggtggaaacgtttcacctctaaatctgaaataaagataaaaatttagttatttggcatcaggttttgggctcagttgcttttcccccttatacttaagatagttcatatagtttcttgcatacagggtaaaggctatgtcagagcatgtaaagaactggtaatgaaatggatcacataggatgtaagacccacactttggtgtactcacaactattctcatacctgtgtaagactgaatacagaatgggagatgagagctactctcatggcaacttttagccacagagtcatgcctcggtttctttacataacaaatgtaaataagaataacacatttactttgtaattaagttctgagaagttacaagaatttaaaaaatccatatctaagatttcctcatattaactaagtacttcttgaaataaatcagcatagatacattacctgaatctaattttacactgcatagtaggatccttaataagcttagcctctaagggggccactttcttcagtatttcatgtgttacatagaattcctgaaataaaggacagtgctgtaaaaggaaagcagtatcccacccagacacaatttatggactataacagaggcaacgtggtaaagtgaacattatgctggacttggagttctgaaggggtgggtttttgttttggcacctccacttactatctgtgtagccttgagccagttacttaatcattttggcctccaactttggttatctgtcccttttagagatcaaaggcactattatttccctatgacagcacttttcacaatatattataattacttatcaacttgtctgtgcctcctactagactgtaagcttcatgaaggtagggatggtggcttttctctttaccactatattcctagcatctaatacagtgcctggaacacagcagatgcttaagaagtatttgttgaatgaatcactgtaagatgaggatgataatagtaataagttactagcttttaagcaccttttatgtaccatatactactatgttaggtgccttatatacattagctcatttaatccttacatcagcaacactatgagaattttttgtttgttttgagacagagtctcgctccgtcgcccaggctcgagtgcggtggcatgatctcggctcactgcaacctccgcctcccaggttcaagcgattctcctgcctcagcctcccgagtagctgggactacaggcacctgccaccacgcccggctaattttgtattttttcagtagagacggggtttcaccatattggccaggctggcctggaactcctgaccttgtgagccgcacgcctcagcctcccaaagtgctgggattacaggtgtgagccaccactcaggctgcagtgcaatggcatgatctcggctcaccgcaacctccacctcccaggttcaagtgattctcctgctcagcctcctgagtagctggaattacaggcatgcgccaccatgcctggctaattttgtatttttaatagagatggggtttcttcatgttggtcaggctggtctcgagctcccgacttcaggtgatccacccgcctcagcctcccaaagtgctgggattacaggcgtgagccactgcacctggcccattatgagaatattatcacgcctattttacagatgagaaggctgaggctcagggaatttttgtaatttataaaaaggcatacaggtagtgaatggggaagccaggattcatttagttctgtttgactctaaagtcccaactctttcccccaaacaaccccaaccaaccccgttatgcctatgataatcacataaaaatgtacactaaagagcttttaggctgggcactgcggctcacgcctataatcctggcactttgggaggccaaagcgggaggatcacctgaggtcaagagttcgagaccaacctggtcaacatggtgaaaccccatctctactaaaaatacaaaaattagccaggcgtgatggcaggcgcctgtagtccaagctatttgggaggctgaagcaggagaatcgcttgaacccgggaggcagaggttgcagggagccgagatcgtgccactgcactccagcctgggtgacagagcaagactctgctcaaaataaataaataaatagcttttaaaaggacaaagcattattaatttaaggtattaaagtattactataacagataaaaaagaatttccttctgttacaaaagtctaaaaatactatgaaaccagcattataaaattaaatacaagttccatattcaaagacaatggataatagacctgaaatgccaggagtttacctgggtgggttttctctgaagtattcagacggagtcttgctctgtcgcccaggctggagtgcagtggctcaaactcggctcactataacctccacctccccggttcaaggtagctgggattacaggcgcacaccaccatgcccggctaatttttttgtatttttaggagagacggggtattcaccatggtgaccggactggtctcgaactnnnnnnnnnnnnnnnnnnnnnnnnnnnnnnnnnnnnnnnnnnnnnnnnnnnnnnnnnnnnnnnnnnnnnnnnnnnnnnnnnnnnnnnnnnnnnnnnnnnnnnnnnnnnnnnnnnnnnnnnnnnnnnnnnnnnnnnnnnnnnnnnnnnnnnnnnnnnnnnnnnnnnnnnnnnnnnnnnnnnnnnnnnnnnnnnnnnnnnnnnnnnnnnnnnnnnnnnnnnnnnnnnnnnnnnnnnnnnnnnnnnnnnnnnnnnnnnnnnnnnnnnnnnnnnnnnnnnnnnnnnnnnnnnnnnnnnnnnnnnnnnnnnnnnnnnnnnnnnnnnnnnnnnnnnnnnnnnnnnnnnnnnnnnnnnnnnnnnnnnnnnnnnnnnnnnnnnnnnnnnnnnnnnnnnnnnnnnnnnnnnnnnnnnnnnnnnnnnnnnnnnnnnnnnnnnnnnnnnnnnnnnnnnnnnnnnnnnnnnnnnnnnnnnnnnnnnnnnnnnnnnnnnnnnnnnnnnnnnnnnnnnnnnnnnnnnnnnnnnnnnnnnnnnnnnnnnnnnnnnnnnnnnnnnnnnnnnnnnnnnnnnnnnnnnnnnnnnnnnnnnnnnnnnnnnnnnnnnnnnnnnnnnnnnnnnnnnnnnnnnnnnnnnnnnnnnnnnnnnnnnnnnnnnnnnnnnnnnnnnnnnnnnnnnnnnnnnnnnnnnnnnnnnnnnnnnnnnnnnnnnnnnnnnnnnnnnnnnnnnnnnnnnnnnnnnnnnnnnnnnnnnnnnnnnnnnnnnnnnnnnnnnnnnnnnnnnnnnnnnnnnnnnnnnnnnnnnnnnnnnnnnnnnnnnnnnnnnnnnnnnnnnnnnnnnnnnnnnnnnnnnnnnnnnnnnnnnnnnnnnnnnnnnnnnnnnnnnnnnnnnnnnnnnnnnnnnnnnnnnnnnnnnnnnnnnnnnnnnnnnnnnnnnnnnnnnnnnnnnnnnnnnnnnnnaaaaaaaaaattagctgggcatggcggcacgcacctgtagtcccagctactagggaggcggaggcaggataatcccttgaacctgggtggtggaggttgcagtgagccaagatcatgcccctgcactccagcctgggcaacagagtgagacttcatctcaaaaaagaaaagaaaaaaaagagtatcactaataata

SEQ ID NO: 926 - DNA, 1191 bp, Homo sapiens
aaaaaatgtaagctgaaatgatgacgtgttcttttagaaggtttatcatagcaactactataggcagtgattctaagaagatgctattctttttttccattgctttgtctagttttttttttttaaatctgtttttgtgcctttgtaattctagggttattggtatagttctcaccatatcttgaatacagatgctttttcctttggaaataatttctcataaagcacattgcttatagctgcttcccttttcccagagtagtaaaagttgtgatacaagacagtgatatcagctgggcgtggtggcacacgcctgtaatcccagcacgttgggaggccaaggcaggcagatcacttgaggccaggagttcgagaccagcctggccaacatggtgaatccccgtctctactaaaaatacacacaaaaaattagctgggtgtggtggtttgtgcctgtagtcccagctactcgggaggctgaggcacgagaattgcttgaaccagggaggtggaggttgcagtaagctgagattgcaccactacactccagcctgggtgacagaacgagactctgtctcagaaaaaaaaaaaaagagacaatgatatgaaaaggtcttacatgaatgagttttacgcatgattcaatctgtaagtcctataaattatttttgatggatggtatctattttcttcctattagtagtttggggcaaaaataaatttaactgaatgtaaaaatattcagctctatggggagctgagaagaactaaatattttcagacacttgttatgtgcaggttgtttggcatatatttttaaaaatctttataataccattttgaattaaattctatccccatttaacaaatgaggaggtggtttctattcttaagtaactttcccaaaatcactcaattaagtggcaagggtgggatttaaatcgaagcctatactctttcacttgtttccaaagatgccaaactcaaaatgtggctaaacagtaaatcttgagcaaagaaatgatttactaggaagcagcacaatagaacatactggatgtaggaaatgttatatatcttgatctcattggtggtaacacaagtatatacatatgaaaaagttagttttatccttactgttagtactcagtgctcttattattcctcaaaaatgaaaaaaaaagtaaaaaa

SEQ ID NO: 927 - DNA, 1192 bp, Homo sapiens
aaaaaatgtaagctgaaatgatgacgtgttcttttagaaggtttatcatagcaactactataggcagtgattctaagaagatgctattctttttttccattgcttggtctagtttttttttttaaaactctgttttggtgccttggtaattctagggttattggtatagttctcaccatatcttggatacagatgctttttcctttggaaataatttctcataaagcacattgcttatagctgcttcccttttcccagagtagtaaaagttgtgatacaagacagtgatatcagctgggcgtggtggcacacgcctgtaatcccagcacgttgggaggccaaggcaggcagatcacttgaggccaggagttcgagaccagcctggccaacatggtgaatccccgtctctactaaaaatacacacaaaaaattagctgggtgtggtggtttgtgcctgtagtcccagctactcgggaggctgaggcacgagaattgcttgaaccagggaggtggaggttgcagtaagctgagattgcaccactacactccagcctgggtgacagaacgagactctgtctcagaaaaaaaaaaaaagagacaatgatatgaaaaggtcttacatgaatgagttttacgcatgattcaatctgtaagtcctataaattatttttgatggatggtatctattttcttcctattagtagttttgggcaaaaataaatttaactgaatgtaaaaatattcagctctatggggagctgagaagaactaaatattttcagacacttgttatgtgcaggttgtttggcatatatttttaaaaatctttataataccattttgaattaaattctatccccatttaacaaatgaggaggtggtttctattcttaagtaactttcccaaaatcactcaattaagtggcaagggtgggatttaaatcgaagcctatactctttcacttgtttccaaagatgccaaactcaaaatgtggctaaacagtaaatcttgagcaaagaaatgatttactaggaagcagcacaatagaacatactggatgtaggaaatgttatatatcttgatctcattggtggtaacacaagtatatacatatgaaaaagttagttttatccttactgttagtactcagtgctcttattattcctcaaaaatgaaaaaaaaagtaaaaaa

SEQ ID NO: 928 - DNA, 228 bp, Homo sapiens
tcgaggtcaggagattgagaccatcctggctaacatggtgaaaccccatctctactaaaaatacaaaaaaaattagccgggcgtggtggcgggagcctgtagtcccagctactcgggaggttgaggcaggagaatggcgtgaacctgggaggcggagcttgtagtgagccaagatcatgccactgcactccagcctgggcgacagagcgagactccgtctcaaaaaaa

SEQ ID NO: 929 - DNA, 711 bp, Homo sapiens
aggagatgaaactagagatttgtgccaaattgtgaaaggccttgactgccttgcttcttgctaaacagtggaatttatcaacccactgagacaaagtcagttaagatttttgagccttccatatatttagctgcttatatttaatgtcttgtctttaaaaataacacgtatgacttgttgtttgcatgcttttgcatatataacttatttgaagttaggtgcttctactgattgactttgactttttgttcacaaaaatatagggatcttgatttatgactggaccacttaatgtattaatttgcactgtgttatatcctaaacttttaaaactactcatgactaatgtctttcaccaaactgttacctacgaactttctaaagaaatgtgtgacaaaggcgtgattagtttcatttgctctgccatttttagctgtatatgtgataaaacatgttttaatacatctctttttaacttcgattttatttggaatttttgaatgagctgtttgtttgtttttaagcaaagtaattggagtgaactttctttgattcccaggttttcttttttccccttttttctttttttattgcattggtagatgcagggcaagaaatttattactctaaatttgtgactcagaattttaaaactaaattaacttcataaatgcgctcacttttttcttaatgcattacgtctaaccccca

SEQ ID NO: 930 - DNA, 374 bp, Homo sapiens
cctctctctacaagatggtataaaatttagtattattttaaagaaataatacctagcagcagtaacctggcagcccaaaggctgtatatggcccgtagatgtgtatatttatgtattttgtatcagcatttaaaactaggagattttgtattaaaatacaacatttagatttgttggaaaaatttaaaaagtctgacaaaactgtacctttatagtactcctttataggagtcagaggctggagtcaagtgttaactgtgttggacttgcttttcagtttgacagttcatggtatgccaacacctaggctgtttttcagttgccatttattatcatatgtgctctgctgcttttcttacgatagagaaacatgt

SEQ ID NO: 931 - DNA, 710 bp, Homo sapiens
aggagatgaaactagagatttgtgccaaattgtgaaaggccttgactgccttgcttcttgctaaacagtggaatttatcaacccactgagacaaagtcagttaagatttttgagccttccatatatttagctgcttatatttaatgtcttgtctttaaaaataacacgtatgacttgttgtttgcatgcttttgcatatatacttatttgaagttaggtgcttctactgattgactttgactttttgttcacaaaaatatagggatcttgatttatgactggaccacttaatgtattaatttgcactgtgttatatcctaaacttttaaaactactcatgactaatgtctttcaccaaactgttacctacgaactttctaaagaaatgtgtgacaaaggcgtgattagtttcatttgctctgccatttttagctgtatatgtgataaaacatgttttaatacatctctttttaacttcgattttatttggaatttttgaatgagctgtttgtttgtttttaagcaaagtaattggagtgaactttctttgattcccaggttttcttttttccccttttttctttttttattgcattggtagatgcagggcaagaaatttattactctaaatttgtgactcagaattttaaaactaaattaacttcataaatgcgctcacttttttcttaatgcattacgtctaaccccca

SEQ ID NO: 932 - DNA, 1972 bp, Homo sapiens
tcacccaacaatgtttttttcatgttgatcactttactaaagcgaacaattggggttttaccaaaattgtgaaggattttattcttccatacttatgtctgtgttcagggtcatacagattctactttttccttttagtttaaggtattctcttggagatttaatgtacttaaatttgaccacaatttattgagagcatattctgtgtcagacattgcactctgcactagatattcaggaatttctaaaaagaatgttaacattgctgttacatagtcagttactgatcacattcttttcctctcaacttttttcaaaataggaatctgcggtatgttttcacgtatggagttcaggtcaggcttaggggtccctgacaatgtgaatagttttaagctgggcctcaattcgtggtacccttatactaatttaacaagccgtggactctaggttccaccaaaaatattttgttccatcctctctggtttcagtccatggtgtacagaaagaaaactaaggaacttcagccccaaattgtcaaattttgctacttaagaaacagaagatttaaatctatcattttgtcttatattccagagttgactggttcctcctgtctttaacttcttgtccttgaagggtattctaattttcattcagaaatatgacttctcatagggtttgtgttagatattttcagggccagatggatatgatgttcccatttctgttttattgttaaactactattccttttgagctgtaatgaacaattcattctgagaggcaatatatgttttcagtaattgacttgaataaaagtaaatgttaaacatggagttactaagttaatacagtgggtattagtactaatttgttcaaattaagatagaattcttaatttgataaatagaattcttatattacagcatcagtccaattggattgatagtttgtagaaaggtaatttcttacatgaggaaagacaggttttctttctcttagcaaggtattaatgcaaaaatgacctcttcatttcctaccagcttccagaagggaaatgctggttaggaggtaaattcaatttactctacaagcaaacttcacatctgttatgctgaagtcagagtttatctttcttgttatgtggaacctagaaatataccatgaggaatactgaaaaataaactagcagaaattttgcgtgatgctgaggatttttagatggctgcaaaatgggtgaaagtaatataaacttaacaaagaatgttgtcacaactctctggaacttagtactgtttttcaactaacaaatggaagatttgtgagactaggtcgacttaatgtgatttcaatgcagtaattactgtgtggcatgggcatggtaagagataggccttttctagaaatattctcatctctgttttttttagttgctcttacttagatttatattaactcagcttcacattttcatttctttttattttattttaaacaatgagaaaaatactccacgatgtcactgatttagttatcagatttgctttatttctgtatataataggtaatgtgagtacaggaaatatatctgaaaaggttacttgtacctaaattttaagttagatcatttaaaaattacttataagtctcttgagtgttttatatagtagggcagatggaaaaacttatttgatattcatttttggtacctcttaggaaaataattgggaatgtattcagttggaaaaaatgttgagaagagtgttttatataatgattatttagtaaaacattaaaaataatttcttattctggaggtttatagacatcaaaattgacaaagattcatggattatacatttcatcaaggtacctttaagcgattttttaaaaaaaattctgactctaacaatgcatgctcattgtagagcgttaaaaatacaaaaacatgcaaaagaaaaaattaaaa

SEQ ID NO: 933 - DNA, 105 bp, Homo sapiens
ttttttgtatttttagtaaagacggggtttcaccatgttagccaggctggtcttgatctcctgtcctcgtgatcctcccgccttggcctcccaaagtgctgggat

SEQ ID NO: 934 - DNA, 16146 bp, Homo sapiens
gtgtggcgtcacttccggcttccttcagtccgctggtcccgagcacgagctgtgaggggattcacttgtgtgcggaactcctcggaaccatggtgagcctgactcccctgcctattgccctacccctgctccgccgtgctcttgccaccccactgcttcctctgtcctgctagggacgtaggctccgtttttgtctccccggccctccgcacatggtgcgagccatgcgcggggcgtgcggcctgcgccaggccagccggtggagctcaccacgagggggaggggtggaccgcaaagccagcgtctccttgtgcctaggtctttgcatagtcccggcagcccaggtccgcgcctcacccggagcgaagaaatttctagtgtgggacccgctccgccctccttctaggggcggagcctggagcgacggggtctgagccatcagagggtggaggggccgcagccttccgagggtggaagatggaggccgcgttccctcgcccgcccggcaggcgtcaccttgatggcctgcaacccctccctgcctcattcttagttcaagatcgtctttagtctcgctgtacgtaactgtcaatctcgctggtgtataatttatactcccgggggccttgtaaatccgaaaagccatgtcgctctcctacaagtccctctctcccacttaaatgctttctccgatgatggaagcttcatttgattgaaaacattgttgtaaatgagttttctcttagatgtccacttgtaagactagtggaaggcacctcagtgtatgtgttagagtattggtacttaaacggaatgcctcttggttttccttttcaggcgtccctttcccttgcacctgttaacatctttaaggcaggagctgatgaagagagagcagagacagctcgtctggtaagccttgttctaagcattgttttaaagataaaactggaggccaggcgcggtggcttactcctgtaatcccagtactttgggaggccgaggtaggcggatgaactgaggtcaggagttcgagaccagcctggccaacatggtaaaaccccgtttctactagaaatacaaaaattagccgggcgtggtgatgggcacctgtaatcccagctactcgggaggctgaggcaggaggatcgcttgaacccaggaggcggaggttgcagtgagctgagatcgcgccattgcactccagcctgggcgacagagcgacactctgcctcaaaaaaaaaaaaaagtaaataaagataaaactgtacttgaagactgtaaagttgattctgataatctccttggtttttactccagacttcttttattggtgccatcgccattggagacttggtaaagagcaccttgggacccaaaggcatggtaagaaaaatagaaaagttttatattttaatattgttttagagcgcttggtggaaatataataacaagcgtattaaaatgctttttaatctttaaaacgtttaattataaaagacaagtatgttctccttagtaaaaatcagagtccccagaatcaccatccccaatcccatgcccctccccaatgacaagtactgttatcatttgcacgtacatcttctaatattctgtttatgtagaagtatgtgtacttcattatgtattttatactcatgtaacatactgttttataaaacagatactatttatcaatacttttttgtagcttgctcttttaaattcctttcagtgtaagtagataacactgcccctttaactgtcaaatattatcctgtaccttaattattttataatttaattatggctgtattgatagtttctttccattgtttttgcagttacggtgttgaaacaaaaactagtgtctacctgtgcttctagtgtttctaggggtagatacatggtttggttacgtggtgtatgtattgaaaacatttgatgaatggataccacaaaatagctatccagagtgtttatacactagcactgtgtgagaatactgattgatccatgcattcttcaagatgtgcttatgtcttaacttgaaccaattatgttccctttaggacaaaattcttctaagcagtggacgagatgcctctcttatggtaaccaatgatggtgccactattctaaaaaacattggtgttgacaatccagcagctaaagttttagttggtaagtctgaatatactttttcaccaacctaataatactgtttgttaacatttttgaaataactttataaataggctgtgttgaccaatcgtactgtcaattgatgtccactagttgttaattatcgttgttaaaatacaagcttcaggagtgcccgtatgttggtggtaaaactgttgcatttcagacctcagagttccaaataatttgttgaatgaggaaccctggtaagtttagattggtagtgaatatttttggagaatttagtaagcaaagaagcaattttgagttaataactaatttctttttctagatatgtcaagggttcaagatgatgaagttggtgatggcactacctctgttaccgttttagcagcagaattattaagggtaagagcaactaagcaactcttttttcctactgtgtttttgagtatcagaggtaatctagtccttacttcctctgtctttactattgaggagtgcttaataattttctatttataacttttgttttataactttattaataggaagcagaatctttaattgcaaaaaagattcatccacagaccatcatagcgggttggagagaagccacgaaggctgcaagagaggcgctgttgagttctgcagttgatcatgggtttgtatagcaaagtactactgttctaaacatttagtgttctttcataacatgcttaatgcaagaaatctataggacactgaaaagcatacacaaagatcatcttgctgcctcaccccactccaacagtcaaacctacatcagcctccagagatagccactaaagttaagtttgggtttttagtctttttgtatatatcatcaaaatatacaaataaagcaaatagtataatactgtatagagaatttgttagcctctttttaacctagttaaatattaagcacatttttggatgtcaattttctgtgcagtattttaatagagttacacatttgaatatttggctagaatgactgtattaacctatctgtagggggagatttgtgtatttgatgatttttagcattataaaataactttgtgacgttgcgacatagcccaaaggtttctagaagtgtaattgttgggtccaaaggtaagtgtgtgtgttttaaggcacccccaaacctgggctgcacagcaggtgagcagcaggtggaaaaattgtcttcccatgaaaccagtccctggtgccaaaaaggtccgggaccactgttttaaggcacttctatttatttgcccattcacaactgtataataatacttgtttttcacgtccttttatttatttatttattttgagacggagtctcgctcttagagttgcccagaatggagtgcagtggcacgacttcggctgactgcaacctctgcctcccgggttcaagcgattctcttgcctcagcctcccaagtagcagggactacaggcatgtgccatcatagccagctaattttgtatttttagtgtagatggggtttcaccatgttgctcaggctggtcttgaactgacctcaagtgatccatcctcctcagtctcccaaagtgctaggattacaggcgtgagccactgtgcccggccatttctcacattcttgccaacattagacttttgcatgcttgtgtggcccccacccctcttttttttttggcattttgccagtttggtggggaaaataacatctttaatttgtgtttcttgattactgctgaggtttaattcttttcatatagcttacagacttgatcagttagggtaaaattatctattgacatgaatatctagataaattttgaaaagtaaagtagggttaatatgtatatttggttggttttatttagttccgatgaagttaaattccgtcaagatttaatgaatattgcgggcacaacattatcctcaaaacttcttactcatcacaaagaccactttacaaagttagctgtagaagcagttctcagactgaaaggctctggcaacctggaggcaattcatattatcaagaagctaggaggaagtttggcagattcctatttagatgaaggtatgtatgaatgtcagatacaagaagctttgattagatgctgagggctgaatactgagtgaattctgttttgagaccagtgaccctttacaaagccagtgaacttgaatttaaggacatatcatatgtgcaaccatttttgtcattttattgacagtgtactcctcttcccgcgctattccagcattgttgatgatctctagagtttacttaactaccatgaagttatttgcagtctctgataaagaggaaatgttttcttttactagaaatcatctattctcaaatggtacttttaccaggattatatgtattctccaggaagggtctgggtcagtcaaatcattgtgttagctggttgttgaggatgtacagttgaccattgaacaacatgggtttgaattatgtaggttcacaatgcaggttttttcaataaatatagtcagccctttgtgtccgtggtttgcacatgtgcaaccgaacgtggatggaaaatgcagtatttgcaggatttgaaacccatgtatatagtgggccagcttttcaaatctgctggttccagtcagcctggaacttaagtatgtggggattttggtgtatgtgggcgtcttggaaccagtccccttcgtatactgggggatgactagttttttttagaaaagaattaaaaaaaatttctttaacaaataattatgtatgtttatagggcaagaggatctagttcttaaagagtgataaatgagacataataagtactgctttcttagtagtacatttttgtttagagtgaagttttccagatcatcttcacattatatttacttcacaaaatggcctgtcaaaaagtataggcattcttatatagagaaggaaaaaaaaagaattagatggtgctttacaacttctgtttttaccagtggtttggagtcctggttttgttctgtgtcataggtcttgatttattttaagagagagtcataattctgaaaatactcttgattaagtttatatacaagagctgtgtagcatttctttttttttttttttgagacggagtctggctgtgtcacccaggctggagtgcagcagtatgatctcgcctcactgcaaccactgcctcctgagttaaggcgattctcctgcctcagcctcctgagtaggtgggattacaggcgtgtgccaccatgcctggctaacttttttgtatttttagtagagacggggtatcgccatgttgaccaggctggtctcgaactcctgacctaaggggatccacctgcctcagcctcccaaagtactgggattacaggcgtgagccaccatgcctggccgctgcgtagcatttctgataggggctggtggtagggaaggagcattaaaacaagaatattagtagcacaagcagcaccattcttgaatgtctgctctgtactaggaattgtaataggaactttagtcatttagtcatcatgacctggtgagtgaggattaggttcacttgaatagagtagaaaacccaagataatggtggcttcataatggaaaagtttctaatgtaaccaaaaaaaggcctagaaaggtaggtggtactgggtttgtatgatggttccaaagcagcaggactaggctggtaactagcacctctgctactggttacattcctgttttacaaattagcatttctggttggataatttgtcgaaggttatatagccagcagcaggggcatgatcagggtcagatttatctgactccacggtgtccatggtttttccatttttaccaccagcctcaatacctgaatcttcaatttttctcttgtggtggtgattttaagctaataaaaatataggacttaacctattgtctttatattgcaacccatacagatgtgggtgtagcgtatatctgaaacaaaagtttcaaaatactgtttaattttattgtctgtactgtgctcttatattttctgtttcatattttttaagtaacccattaaattgattttgtaataactcttctagtgggatgctttataccagaagtgtccaaggaagagaatacagtcatgggttcctagtttctgtttctggttgggtcggtaaagccccttcctcctccctcttttctgcttatcactagagacagaaactaaaatccatggctttcaggcgctaaaagcctaaaagcaaaacaacaacagaataaggcaggttggacaagcttgcttttatgccttctaagagcttggtaaattggacttaaatagcttctttgaaacagtgatatgataaagcagacagctttttataagatttactaaggctgctttgaagtattaaatatgatactgttcttatatttattgtaggcttcctgttggataaaaaaattggagtaaatcaaccaaaacgaattgaaaatgctaaaattcttattgcaaatactggtatggatacagacaaaataaaggtatgtaactctactttttaaaaattaaaattactgcccaggcagagtggctcatgcctgtaatcctagcaatttgggaggccaaggtggtggatcatctgagatcagaagtttgagaccagcctgaccaacatggagaaaccctgtctctactaaaaaaaaaaaaatacaaaattagctgggcatggtggcgcatgcctgtaatcccagctattcgggaggctgaggcaggagaatcacttgaacccaggaggcggaggttgcactgagccgagattgtgctactgcactcgagcctgggcaacaagagtgaaactccgtctcaaaagtctcaaaaaaaaaaaaattgctggattctataaactcaggaatcaattgcactaaaaagcttggaataggtatgaatctattgtgtatatacacatatatatacgttggtaaaaatgttgaaatatgctatgggactctttaaaaagagtaatgaggcctggcgtggtggttcacgcctgtaatcccagtactttgggaggccaggcgggcggatcacaaggtcaggagttcaaggccagactgaccaatgtgagatggtgaaaccctgtctttactaaaaatacaaaaattagctgggtgtggtggcgcacacctgtaatcccagctgcttggaaggctgaggcaggagaatcacttgaacccagcgggtggaggttgcagtgagccgagattgccccactgcactccagcctgggcaacagagcgagactcaatctcaaaaaaaataatgaaactgatgctctctttatgcttcgtttgtcttagatatttggttcccgggtaagagttgactctacagcaaaggttgcagaaatagaacatgcggaaaaggaaaaaatgaaggagaaagttgaacgtattcttaagcatggaataaattgctttattaacaggtctgtgtttgcttttaagaaaggatttttttccatgaaagtttatggaatacttcatatttacttatattgaattagattttttacctaggaactgtcttagataacttcacttaaattatggatttttgtaatcagtaaattgtgatttatgcacacttacagtgaccagaattacgggattgatttatacagttactataataaagaacacttcttttcatactagtaatggatgcattagtactatagttgataaactctaattatataggtaagaaatgcaatcttgttctaatttgcatttcttttacttgtggtaaaaatgtttacatgttttttagtctaatgtagtttatcttgtaacagttgtgagcataatgttttcatgtaaaatatttacaggcaattaatttataattatcctgaacagctctttggtgctgctggtgtcatggctattgagcatgcagattttgcaggtgtggaacgcctagctcttgtcacaggtatggaaaaaaggtattgttttctaacaaacacaatagtcactcttgaatttgttatttgttactatatgcaactacctttaaggagtttagaatttcagcagttattctgaaatctattctcttggatacctttaatttagatacatagatacattacatttacgataccaagttatataccacatttgccgtaggtatagatttctttcattgtgtcactgttttaaaggtagatttttggccaggtgcagtggcttgtgcctgtaatcccagcactttgggaggccgaggcagccagatcgcttgagctcaggagtttcagaccaactttggcaacattgcgaacccacatccctacaaaaaaaaaaaattggccaggtgtggtggcaagcgcctgtgatcctagccacttggggggaggctgagggaagagaatcgcttgagcctgggaggcagaggttgcagtcagcggagatcgtgccactgcgctccagccttggcgacacagtgagaccctgtctcaaaaaaaaaaaaagatatgtatatttttttctcacaaacctgtaagaccgttgttaaaatctgaacaaactagagctttaaaaagtcttaagtctacttacatttatctagttcgtacatttgtttttattgcttagtaagtagttgaatgctttgtgtcctttgtagtagtacagttacaatagtaacctttattgaacatttactgtgtgctggagagtgggtcaagtactgaaacattgcttttgttaattttaaaaaatttctgaaagtaataaacgttagcatacgtgaaacaatcaacattgtataatgaaaattagtatacctcaataccctttaatagaagtatgagtgatataattccagttgtgtcaaatagaaattgtgtttataaatcagacatgtctgtctacatcacaatgacatgagttcaggctggttgcggtggctcatgcttgtaatcccagtgctttgagaggccaaggcaggaagattgcttgaagccaggagttcaagaccagcctgggcaatatagtaagactgtctctacaaaaaattagctgggcgtggtggcacatgcctgtagtcctagctacttgggaggttgaggcaggagatctcttcagcccaggagtccaaggctacagtgagctgtgatcacgtcactgcagtccatcctaagtgacagagcaagaccctgtctttaaaaaaaaaaaaaaaaatgcagcttgtttgctttttattgtggtaatggtttaaaaattattgtttattaaatttttacagatttagggatataagtatagttttgttaatggttttcatagtacactctaagccctggaaaataagtttaacacttttctagattttaggtccttgaaaatgaatgaataggttggaaagttggtttgggaatgagaattaaggagacctgggttatgagttgtgaagtcagtagggctgtcacactgtttggaactgccatgaatattagaagaaattatagtgtactaacctttggagagtggacttggtctcatcccagaatgatctcttaagacgttttttttaatcatttgagaagcatagtcgtcttctaaccaagagacattttcctttaattacttgaagtgggtttacttgctttaaagttacttaggagccattgcgtacttgatgctttaaggtgacaaataaacacaatttaagatgctcatgtttatgtaattcattctttagttccacaaaataaagatgtaagaggccgggtgtggtggctcacgcctttaatcccagcactttaggaaggcctaagtgggcagatcacaaggtctggagtttgagaccagcctggtcaatatggtgaaaccctgtctctactaaaaataaaaaaattagccaggcgtggtggtgggtgcctgtagtcgcagctactcgggaggctgaggcaggagaatcacttgaacccgggaggtggaggttgcagtgagctgagattggcgccactgcactccagcctgggtgacagagcgagactccgtctcaaaaaaaaaaaaaaaaaaagatgtaagaagtaaatggtaataatatattgatgggataaacatatcgtaaggtcttgacatgaaattgctctatacccagaagaatgtttattaagtacaccaactgtatgtctatgaaggtgaccacatggtggctcccatccttaaaagctcagtggttgtcaaaggtgtatgatgacattggttcttgcaagtgtcattaaataaatgtcttgcactgggcatggtggcatgtgccagcagtttgatctattcaagaggctgaggcagaaagattgcttgtgcccaggaggttgtgctatgatggtgcctggtgaatagtcattgcgctccagtctaggcaaggtagcaagacactctctctttaaaaagaaagaaaagtctcatgtagaaggatgaagtgaaaagtttcataagccaagttagtcttatttttggatatgacgtcccaaatatctgttgtgtctcacatctagaacacaaagcagtctcagaattttgccagccaaaagtaaaaagaactttatacaaattatgagtataaattagtagtttcaaagaccagagtctttatgaatttattataaaataaataatagagcattgacagatttatcagtaaggcataggaaaagaagggttgattgataatatatgcaattcacattatgaaaggagtagtcagctagagaaaaggattttgaaatggaaacctgacttttgcttagttaggaaatagggaacgaagtggctgacctgttcagtttacagcatggaagatggagggaaaataggaatagaaatgagacataaggactaaattaatttgttcttattaaatttggtctgggaaattcttagtatgcatttcttgtttttttaggccttaggacatttcatttgtgataattagagatatcaggtgcttattaagcagttcatgaagtgtatagtggttgacttataggacaaatattttcatgtcttgtgctgggaattgtatcatgaggtcttagtcttataggttggattcagaagagaatctgaatttaaactcaaaagtaactgctttaagactcagtttaaccttgggaaggtagtattgtatagtgtgtgcttataggtctgaagccagactgcttgagtttgaaccccagctttttatattcatcctagttaggtctttggataggaaggtaaacctcttggcctcatttttatcatgtgtaaaatgggataataatggagcctatccaagaggattattttaaagattaaataattagtcgatatgaagtatttaaaaagagtgccaggaatataatcagcaatcaatttttaaaatgtgaaacacattacctatcattatctatccattactgcttattagaaaacaggaattttaagcctgctgtgcatttaactaatacatgtttatgtttataggtggtgaaattgcctctacctttgatcacccagaactggtgaagcttggaagttgcaaacttatcgaggaagtcatgattggagaagacaaactcattcacttttctggggttgcccttggtgagtgattatgtagatcctggttagggtgtctaaattcttgctaggctctgttgaagtaaaggttattgtagttactagaatagcatatcttacaagtcttaactcttcagaagcatgatacatactttgtttcagtctcttgagtcaacctcatatttaccgtgtctttgtgaacagtgcatgttcaacagttttttttccttgataacttagaaccattatgagccttgattgttggagaatgtataatacaggaagacaggtcagctttcagaacccagtaatataaccaacaccggcataaataatagaaggcaaactttttatccctaagtggtcactgtgtcttttaattttaggtgaggcttgtaccattgttttgcgtggtgccactcaacaaattttagatgaagcagaaagatcattgcatgatgctctttgtgttcttgcgcaaactgtaaaggactctagaacagtttatggaggaggtaagcatttagaaaatgttgaatatatttttaatttcttaaagtacaatataagtcataagtggttttaatggttcttacagaaatcttatattgcttttgcactaaattttaaaatgcttggcatatcttaaagtcagtaattcagtatcttggagacaactaagcattgcaatattttattggaattttaatctttaggctgttctgagatgttgatggctcatgctgtgacacagcttgccaatagaacaccaggcaaagaagctgttgcaatggagtcttatgctaaagcactgagaatggtaagttaatcaaaatgagagatccgaacttaagttttgtggttattgatagttttaaaatgagtagaaaatgaactggttaatactgcttttaaatttgattctggagtttctcctcttcgtgagcagtaactgaagcagattttacattgttcctaaatgtataattttaaaaagctatcctagttaggagtaaatcagtggttcttacagtagagtgagtagttacttgttttcttcattttcatagttgccaaccatcatagctgacaatgcaggctatgacagtgcagacctggtggcacagctcagggctgctcacagtgaaggcaataccactgctggattgggtaagcaatcaaggggaactttgtggccgttgttaaaagtaactcttttcactaagctttttttttcttttggaacataaagagttacaataaccgtataaaagactcttttggactttgtcctcataatcattacatgtgctgggaaaatgtgtgtgactttatatgctcagcatttcccaaactttgttattccataagacatgtaaaactggttagaagatttgtaactatttggtatataacgactataggatttaaatataaacaatacttacattctgaaaaataacataaactattatgttgtttatacaatcagtattaacttctaatttcatagtaaacttactgcaagataatcttgagtacagatcacagatctctagtccatagataaaagtggccaatgaggcagatttaattcatattgaaaaactttctgacaagctgtgctggacattatagagtagtcttaagaaggtagataatcctgtcattgaacaagagggagcaccagttaatctgtgagaaaatgaagcaggattctcacaagaagagaagttgggtaggtaacttatgaattttcttccatttgttttttattatttgatatgttgtcttctattaatatgggtgatcagtagttgacattattgttgttattactattattataactgacacaatggtcttgctctgttccccaggctggagtgcagtggcaccatgataattcactgcagccttgaacccctggctcaagcagttctccttcctcagccttccaagtagttagggctaaaggcatgtgccacaatgcctgactaaattatttttattttcttagagatgggggggcagtctcactatgttgttcaggctggcctcaagcaatcctcctgcctcagcctcccaaagtgctaggattataggtgtgagccactgatcctggccccttttattttatttatttattttttgagatagagtttcactgttgttactcaggctggagtgcagaggcatgatctcagctcactgccacctctgcctcctgggttcaagtgattatcctgcctcagcctcctgagtagctgggattacaggtgcccaccaccatgcccggctaattttttatatttttagtagacggggtttcaccatgtttgccaggctggtctccaactcctgaccttaggtgatctacctgcctcagcctcccaaagtgctgggagtacagatgtgagccgctgcacccggccccttttaatttttttaaaggctttctttgagctcatttgtaggcttatctacctactgagtaaagtagttgggtgtcctaattttattaataggattaatttttattataaatcattagagatgttttgatactttagttaaaactgctttttagtaaatttgtttttctttgcagatatgagggaaggcaccattggagatatggctatcctgggtataacagaaagttttcaagtgaagcgacaggttcttctgagtgcagctgaagcagcagaggtgattctgcgtgtggacaacatcatcaaagcggcacccaggtaccctaacacttttctcagaaaaaattactaacagcaaaacaaaatagggagctgtatttattttataattagagttaatgaaaagcagagacagttttgcctggataaaagtatgtaagttatttaaaatatcacaactcttaacacttaagccagaaaaacttaaggggaaagagggatgggcagctgaggtagctcttaggattgaaaaggcacagaaagagccatgcttggaaaggtcaagtactgaggacagtagatgctgtgatgctttctattgtctttaaacagaatgatagcaaaaggaaactgagttctgtaactaaagtgttctagggcaaggtcatatagccacacctactcccagaaatcttcacaagaagtcagtgccctcacccacagttgaaataacgcttaaaaaatgtataataccttgtttggtctgatactgttttagagatcaggtatcttttattagcaaattctgagtaatttgcaataaagaaactgaattttaactcagccttccagacctaccagaccatgggcttctttttcatattccttattaatctccagaagactttttttttcagatcagtgccctgtgacagctgcttcataactcttgacaatggttagcatcctagtccccccataagctaccaagggtgaaaagtttatctctctatatgatccctgtataatgctgtactctttgatctgttcttaagcttcttcagcttctcgtaactgttgtgtttgcctctaaaagcagtgtttctcaagctttagatccttgaacaagcattaagtacaaatttactagtacccttatcccatctttccaaaagattgttctatgcccccttattgtatggtcatcaaagaataaaagatgagaatagaaggtgcttcttgttggtgggggtgtctgcagagtcccaaggcagaacagtcctgatgtggtgcagggcatcacacagaggagggggctgagtggctagctcaggtctgtcttcctcctcacctaaagccagcagtcccatcctatataacccattagtccatgacataacttggtcacctcttaaaagcccaacttccaatactgccacattggggattcagtttcaatgtgagtgttataggggacacacatgcaaaccattgcagagttataacagttttaatacaggattctagttgtgtttgtatttagtataatactttggataaaatcatgctcttcatttttcactattgacttttttcttactctcataggaaacgtgtccctgatcaccacccctgttaagcattcccacgtgctgtcgatctttggaccagtttctagcaaagttgtgtttgaaagatactctattaaagaagactgtggaatctgtttatcggtgcccattatatccttaagtttggatatttagctgaccttcgctttaacataggtctaatttatttgccgtgtcattttccatacaaatcagttgatttaaaaaagttcatttctcatactgtgcattaaaataaaaatttgaacaattacttggttct

SEQ ID NO: 935 - DNA, 100 bp, Homo sapiens
ggtggatcacttgaggtcaggagttcaagaccagcctgggcaacatggtgaaaccccatctctactaaaaatacaaaaattagctgggcatagtggtggg

SEQ ID NO: 936 - DNA, 1744 bp, Homo sapiens
attcaaggctcactccagtccacgtttctagcttccgtcttccctcccctgcacatactactgcatgtacctccacagtcttcccttttgctttgctggcatctcatgtctttgttgcctatccaagctccctgttgaaattctatccatacttataattaacatgtcccttgattcatacagactttatcagcctgcccttagtttctgtcagacagaattaagtcctctgttcccatataaagcagatctttatagctgttttagtagatattgtttatatatctctctctttcacagccccttgtaacccatctcattcccatattctctttcaacccccatctctgattacagatagaaagggtgataagtttgtgggctgtgtctctttaatcttgtacctccacagcatctaggacagtgtcttgcctaaagcaaggatggaattaacatttgttaatagacgcttatctgtcagtcttactatcctcaccctgcttcataaggaaattatattttatttatattttatttcaaatcagtaatactgcctgtcacatcactaaaacctcaaaaaacagaaatgtttgaaataagaattttcaggtttgccttgtgataactgtatactaactagttgaaagtatggattcagtatcttcaaagtgttctgatttgctaggactcactgttttcttgtgtttaatcttcagtttgtgaggtcatttaatttgtagcatttgcaaatgttatactgaaaaactctgagaatgaaataagtcactatactacgtatttttataaataaggaagtgcacaattatgtgacttcacatttcttgcttgcttgctttttttggggtggggacagagtgttgctctgtcacccaggctcgagtgtggggtggtgtgatctctgctcactgcaacctcctattcccaggctccagtgatccttctgcctcagctgggactacaggtatgcaccaccatactggctaagttttatattttttgttgagatgaagtttcactgtgttgtccaggctggtcttgaactcctgggcttaagtgatccacctacttcagccttccaaagtgctgggattacaggcaggagccactgtgtccagcttacattttttgtataatcaacattagccagagtaaccacactttagatctgttggtcttcaggaaaagcaatatgtgtctggatgtggtggctcacacctgtaatcccaacactttgggaggccgaggtcggaggatcacctgaggtcaggagtttgaaaccagcctggccaacatggtggaactccatctctactaaaaaaaaaatacaaaaattagccggatgtggtggtgcacacctgtaatcccagctacttgggaggctgagacaggaaaatcacttaaaacccaggaggcggaggttacagttagctgagattgcgccactgcagtccagcctgggtgacagagtgagactctgtctcaaaaaaaaagcgaagttacatgcaataaaatcacacagaaaaattatttttaataaaaaattaaaacaattgacagatatcagttatatgatttattgttccaactgttatatgtgtatttctgagtgccctttggcttcttgcccggtggtacttgaagtcataggataaacatggcatattttccttaagtgtcaatattactcaacaaatataggttaaaaaagcattctatctgatgt

SEQ ID NO: 937 - DNA, 94 bp, Homo sapiens
acgtgcaggtttgttacgtatatatacatgtgccatgttggtgtgctgcacccattaactcgtcatttaacattaggtatatctcctaatccta

SEQ ID NO: 938 - DNA, 199 bp, Homo sapiens
tgcaacctctgcctcccgtgttcaggtgattctcctgcctcagcctcctgagtagctgggattacaggcatccaccaccacgttcagcaaatttttgtatttttagtagagatggggtttcatcatgttggccaggctggtctcgaactcctgacttcaggtaatctgttctccttggcctcccaaagtgctgggatta

SEQ ID NO: 939 - DNA, 984 bp, Homo sapiens
cctctctgcccccatttccactcctgctcttgggacacaggagactggttagatgagagtagaaagtttatttttgaacacccaggtgtggggtggctgggcgagaccatctgatggctttgggagccaggccgcagggtttagcttggatctgttgagtaggagacccttaaacatggccaccctgagctaagagctggtcttggattttgctttcttttggattaaccgagtattttgtgggattccatttgatcccttaactggctgaccagctataactcctggttatgttgttttagtgttgctccaggtgtcgttggaggagaagttgaaggtacaaggagtttgcaggagggaaggtggcagttaatgagccttcctggtgggaccggatggtgagggcaggggcatctggcccagcgtggactcgggccatagatgggaagtggtcatttggaggtcaccatctctctgacaccctgaccatagcacctgcacccctgtgctgagctgcaggtccccggcaccagcgtctgtgcagctcaggtgttgctgagccgtggcctccgcagctctccatcaggatttctcaagcttcattatgaattatctctgtgtgagctcacaacggtgactgcagagtcccaggtcatctctcagatcttctgaatcaaacatatggtctgcagttgccgcgcatgtctttggccgattttctgacaatcaaagtgaagaagttctgagctacgggaagttgggttgaaggcatgatggggaaaacatgattagttgacagcttttcccagagagtttttagacaaactcaaccttggtaaccttctcagtgggcttatgataagaaccttcaatgtgccaaaaaataaaaaaagcagcactccaggtagttaatctttgtttaaaaaacccttccccccacccagtcctgcaaacaaacaaacaaacaaaaaaaggagaaaaaaa

SEQ ID NO: 940 - DNA, 984 bp, Homo sapiens; identical to SEQ ID NO: 939

SEQ ID NO: 941 - DNA, 9545 bp, Homo sapiens
aggtagaagagagaccagaaaaagattttactgagaaggtaaggaatcgttcataaacctagagggtcccaaaagttgtggatgaaattgataagaaaatatgttgcttggttttttttaataaggatgttccccagcgagggaactggactagaaagcggcccacctaacctggtatcaccttcccggaggtaggccaccgggagtcctgtccggtgtgcgttagatcctgtagagcagggaggcgtttataatgggccccaccatggagtttagggttaatccagctaatcgcagagcatccaggaggtgcctggaaatgatcccctccttacagtttactataagcccatgaagagtttccaatttggaaatggaattaaagtaacagtcctgtgatgttagatttatatgcagttttggttttgtctgaaatcgcatctgtgttagtccgttctcacactgccataaagaacttccctgagactgggtaatttacaaagaaaagagctttaattgactcacagttccgcatggctggggagacctcaggaaacttacaatcatggtgaaaagggaagcaggcaccttcttcacaaggcgacaggagagagaacatgtgaaggaggaactgtcaaacacaaagccatcagatctcctgggagcccactcactatcacgagaacagcatgggggaaactgcccccgtgatccagtctcctcccaccagggccgtccctcatcttgtggggattatggggattacaattccagatgagatttgggtggggacacagagctaaaccatatcagcatgtgatcctctcaacgttccaggggtctcgtaacatgccgggcctgtctgcagccacgctggcctctctgggtgggacttcctctcggagaggcagcggagacacctccatctccatcgacaccgaggcatccatcagggaaatcaaggtgagatgctctcttcttactgacaacttgagagaaccttttgtaaaaatcagtctttagattaaaaaaaaaaaagttaattcataaagttctggatctttcttcttggtcctctctccctcacctcccctaaaatacggtgttctcctaacatcaagacccagctcagatagtgtctcctgcaggaatctgatcctacccactgaccccccagcagggcggaccgtgtgccggccccctgcgcccctcagcacccggggaataccttagtgagagcacttggcacgttgtgttgatgcacttggtcgtctctgtatgcttggtctgcatagacattcagtccacaagtttggacaccagacggctttacctactttcacacaacccctccccactaagtatgttccccttcggcctagaacttgccctttcctttctctttgtaatgtgcctttagtagccctcatctttgtattttaatgattttttttatcccactgtagtgtaggtattattctctgctctatcctcagcacccaggacagtgccaggcatttggtagtattctgtgtgtgaaagagaaacacggtgctatttgttaaagtaactagggacagtgcatctgaaaacctgaagactggaagggcaggtgaggtgactagacctgtgtcctccagggagcagaaccaagacagaagcagctggaaggagccagaactgactcagattctgaattttctagtgctttaaactaggtttaaaagggaagcaacttccactggggatgtctgagcagctggatggccgtttgccagggaggacggagagggatttaagcatccaccagagtttggccagggttaccttgaagatgcttccaacacctatgttttataagtttacaaaaccagaagagccatttcccatgtgccacccctgggccacctgcagctccttgttgcttccctttttttttcctttttcttttcttttctttctttctttttttttttttttttttttttttggagacaagagttttgcttttgtcacccatgctggagttcaatggcacgatctcggctcactgcaacctccacctcccaggttcaagtgattctccagcctcagcctcctgagtagctgggattacaggcgcccgccaccatgcccggctaacttttgtatttttagtggagacggggtttcgccatgttggccaggctggtcttgaactcctgacctcaggtgatccacccactcggcctcccaaagtgctgggattccaggcgtgagccgctgcgcctggcctgttgtttccgtttctacagcagagcagcagagttggcggcagtcctgatgtttctctgcccttaggttgcgcgtgccgttcatttgttcaggtacttactgagaggctggctggtgccagatgctgtccccggcaccaggaatttggcaaagtagagacttggagctccataaatgcagggaaaaagtgctactgatttttgcctctagcatcttactgtacattgcacagagtaggaactcctagtgcttgaatgaattactaaataggagttgaaataacctgtaccgttttccgaggctctattttgtctgttttttaaactgtgtaaaatcatatgagatacactaaaattgtataaaatcatgtaaaaatatcatatgggatacacctgaactttaatctttaaatattgaagtttattttcccttaacgcttaataaaataaaaaagaaaattgggtgctcagactacccaaatagaaactaccctgaagtataaaagatttagggaatcacctgttttcccttgacatcatctgccttttttgccatttcccccaggaactcaatgagttaaaggaccagattcaggatgtagaaggcaaatacatgcagggattgaaagagatgaaggtaccaattcacagacgtgtggtctcacgatattaacccaacttaacttaaaaaaaaaaacaacatcctaaagaagaaattcaaagtgcatgcttactgtaaataggctccagggtgtagaagaactcacaatggcaggagtgccggcatgggtgtacactcaccattttcccaaatgcattgtttgaaccaagattgaaaatgtaactgcccagtagaaaaggttactaacatactccctgatgcatgccttagacttaccatccttcccccaggcttaaaaccagtttctcatttcccataggcgtgtgccagacacttgaagaaggttcttggttttcttcactttttgtagtagttgtatacaaaaatgcttcagttgatttgcttctcaaaatatctgatgtctactaataaggccgtcctcacatgccacacttttgaaacatcccaattatttgcaccctgtaaaatgctactaattgaagtaaagactgactatggcattggctttcttggagcgtgtgcacactgcttttagagtgtgcagtgacttcattgcaccagccaggagatgtggttgccctgttccttgacagtaaggtgggcaatcagtgactgtcttccttaggcagcagcggatcatggatctggaagtgggtggcgtatctgttacttccttttcagccccctagaaagtacctgcaagatcatttgaatttaatatcaaagggcaccagacagaggaggtgacatcgatcatgactaattcactatcttcatatctgccacctttcctgaaagggggaaaaataagactctggctttcaattcatgcgaaaaggagccacttggccaggcgtggtggctcacgcctgtaattccacactttgggaggccgaggtgggtggatcaccggaggtcaggagtttgagaccagcctggccaacatggtgagaccccgtctctactaaaaatataaaaattagccaggtgtggtggtgcgcacctgtaatcccagctacttgggaggctgagtcaggagaatcacttgaacccggcaggtggaggctgcagtgagccgagatcgtgccactgcactccagcctgggtgacagagcgagacactgtttcaaaaaagaaaaaatgctgctggggagccactgaaccaaccggagacccgctggtcccacgtgaagcagctgtcctggtgtggaggtacagagctagaccagcactggtccctccagccccctggtagcctctgctgcacctgaactggcagctcttgccgctgcctttagctctgcatgtatgcgccctgaaggttctgcctctctgttttggaatcgccttcccctcctcatgtttggggacctgcaagggtgtgaggcacgtgagggcatcgccatgcgtattttacaggcctctttctctggactgtccttcaaagggaatgacctttgtctttccaggacctacccagtgagatctgcctgccattttcctatgagtcaaaaatctgaactcactactgctcctttcctggttcataagccagagtagggctggttggcagtcactggcttgtggccctatgtaattatctcagccatcacacactggctctttcacaagggctggtcacacgcctcgagtgattcttcagaaatctgttgaacagcctgacacccagccctaggacgccgtgctggggggattccccagctactgagtggggccagagactctactgcctctgtgaccacatccctttccatactggtatctcgtttgttctaatgagtgtgtccattgcttttaatagtgaattttctgagcaatgagaatttgaccaaattgaaaagggggatttccatgcatttgaaattgccatgtgtttcttcttctgatccatttgctctaagaaatatagtctaagtttaggactgagggtttttttttaacagaatactgaatgattctttgttttgatttttttattgcaatttcaaaaatatgacctgctttccacaggactctctagcagaagttgaagagaaatataagaaggctatggtttccaatgctcagctagacaatgaaaagacaaacttcatgtaccaggttgataccctaaaagatatgttgctggagcttgaagaacagctggctgaatctaggcggcagtacgaagagaaaaacaaagtaagcattagtatgatacagaatgttaacaataggctgcgtgcagtggcccatgcctgtaattctggtactttgggaggccaaggtgggaggattacttgagcccaagagttcgagaccagcctgggcaacatggcgagacatcatttctaaaaagaattaaaacaattagccaggtggtacatggctgtagtcccagctacttgggaagctgaggtgggaggatcacttgagcctggaaggttgaggctgcagtgagctgtgttgacaccactgcactccagcttgggcaacagagaagacactgtctcaaaaaaaaaaaaaaaaaaagggaatggtagggtgtgtgtgtgtgtgtgtgtatgtatgtatgtatgtgtggatatatcgtgtgtatgtatgtatatataatgtataatttacattatgtatttttatatttttaaacaatggctctccgcttatccaggaaatccaaacatctgagaataaaagtaccatactctttgccaagtgacttgaaatattgatacgtataatttcaacatgtaaactggagacagtttttctaggagaacatctaagctaaaagcaaaaccatgaaaaaacatacctatgaaagagccaccatgctcagataaggtgcgatcagatgcttcaagattttcctattcatatgtattttctgatttttattttgttctctctcaacaccatagggaaatagttatgagtatcaaagattttaagaaaattatattattttctgctgattgggaaaagacacagttactctacttaagaattaaatatatcaccaagctcagagagagagatagtcttatctgagctttcattaggaaccactggaactagtttgttaatagctgagatcagatataatttctattgagagtctcaagcatgagtcatgtgttaagataagtaatgacagcggactgattccacgaaggctgggcttggatgttctttagatagaaagcaaggaatacttttttcatacttttaggaattgtccaatttttcagagattctgagaaaaacagaaaatgtaatgtgtgagtgtcgttgttgttgttgtttttaactggctattatcctctaaatccaaagggttaaaaccaaggtacccttgacaaccttcaggcctgcttcttcgactgctatagaattgagttggaagctgaagaacattttacgcacaaagttccttatagctgaactctgcaagaggggagcttttcacaagactgatgtcatgtgggaacggaggagtggagagcacagcccagccccccttcgggtgggggcctgtaatgcatatgcattcctcctggaatgctgtcattaggcatcattcagtggactgaaaactcccgagtctcactccagagaagctggatggtgctagaatgctgtcccgagatggacacaggggccatgcaaagccccacaggagggcccttgtcatagccaggagggcaccagccacccccaagctaaaggaagtgggcgaacagaagtgccagggtgagcagaagctcaggccagatcccatctcagatcacccgcctgacaggtctagggaaggagcgtcctgcaggcctgtaagctgtcagcaaagtgagttgggtctcaggccgtcaccagggattgcgctgctgtgactgggcaggaacacagcagagccgagctgccagcttcctgggctgagcctcaggtggggaggccaggcctgaggagcagctaggttttgcaggctctccatttgctcccccaaactctcctgtttttgtctcttaaggggcagccctgaagcacagagctggccaccagctgttcatgagagatgctttagtaggccatgtttatctcctttttatcccaaagagttttccttgtcatatttcagcaggggccattttatggtaagtccttgcagggcagcctcacccaggctctcagcacagtgctgtggaagacaccaggctccctgggggggcccttcgtcggctcttgcttcactgtagataagaaatcagaaaatccttgttgattgcatcaactcctcaggttaatttgacagtaagtcatcaggcatcatctataaagtccagaggaatctgtttgtgttgtttgaaagggcttgaaggccaggtgcagtggctcatgcctgtaatcccaacactttgggaggctggggcaggtggatcgcttgaggtcaagagtttgagaccagtttggccaacatggtgaaacccgatctctaccaaaaatagaaaaattagccgggcatggaggcaggcgcctgtattcccagctacttgggaggctgaggcagcagaatcgcttgaacccaggaggcagaggttgcagtgagctgagatcgcaccactgtactccagcctggacaacagagcaagactccatctcaaaaaaatatataaataaaaaataaaataaaagaccttgaagattgtgatgatgtagtagcaggtgatttgttccacagaaactataaatcgtgagagcctgaactggcatgccagaaacatgggattccactgctttagtgctgtttttctcctttacaggaatttgaaagggaaaaacacgcccacagtatactgcaatttcagtttgctgaagtcaaggaggccctgaagcaaagagaggaaatgctcgaggtaggtagcattctcctgcttttcttttccttttttccctttggagcattttgtcaggccatgactatcttagcttaggctgcagtaataaaataccatacacagcatggcttaaacaacagaaattaattttcttacaattctggaggctgggagtccaagatcaaggttgggttcaggtgaggcctctcttcctggcctgcagacagccaccttcttgctatatccttcctccaacggtggagaaaaagcaatgtctctgatgtctcttcatataaggacactaatcctatttgatcaggaccccactcttatgacctcatttaaccttaattacttcgtaaaaaccctatctccaaatacagtcacattgggcattagggcttcaacagatgaatttagagggacacaattcattccatggcaattactaaagttttcagttttcttaaatctgagagtttaggctaactctccatccctagatttacgaaacagtccctctcattggtgaacattcctattctttggtgatcttgtatttgtttggggaggtgtggtagacagaataatggtcccccgaagttgcctacatccagatccctggaaactgtaaatatgatgccttacatggttaaagggcccctgcagttgtgatgagagaccttgagagaagggattatcctggattatttgatggaacaagcatccttctaagaggaaggcaactcaaaggcagaagtagaagatgtgacacaggaagctgaggttggagcgatgcgagagaggggccatgagccaaggaaagcagctcagtcttagaagctgaaaaaggcagggaaacagattctccctagagccttccagaaaggcttgattttagcccataagactcattttggacttctgacctctagaattgcaagagaataaatttgtgttttaagctgctgaatttatgacgattcattacaatggcaataagaaactaatacagggttggtttttaattttttgacttaatcggttctttaactgctgccttgaagtgagaatttcacccaaagcaggttttcttcctgcacttcttgaagccggaagtaggacaaggaaaaaaatcctagaatgctgacaatgagttcagggttgatgaggtgaaagagtgcttgcggcctcactcactgtcccagctctcaggttctctctcgggctggggtttttcttcctctttaaccctttatctgctttctgtctgttcctttcctcaggaaatccgacagctacagcagaaacaggcgagttctatcagggagatttctgatcttcaggaaacaatagagtggaaagacaaaaagataggggtaggattcccaagtcttgaaaatctactcaaatgggcagcctgcttagcaaatagagttttttcagagtctttagtttgcaaaaccgcttgtctgagtatgcatgcaactcccacgtgacacaaagtcgtattaatttatttaattttattaagtagtgaatacactaacttatccaaattgatatgaacttggattgtgacacggactctccatggagggtcttgtgaatgcgtagctgtgcgctctgcctgccccgtggctgggccgggccggtggttgttgaaacagctggagtgaggaggacactctgaggaggtctgatgtgtgcaagtccagacgtcttgggattatctgc

SEQ ID NO: 942 - DNA, 7809 bp, Homo sapiens
aggtagaagagagaccagaaaaagattttactgagaaggtaaggaatcgttcataaacctagagggtcccaaaagttgtggatgaaattgataagaaaatatgttgcttggttttttttaataaggatgttccccagcgagggaactggactagaaagcggcccacctaacctggtatcaccttcccggaggtaggccaccgggagtcctgtccggtgtgcgttagatcctgtagagcagggaggcgtttataatgggccccaccatggagtttagggttaatccagctaatcgcagagcatccaggaggtgcctggaaatgatcccctccttacagtttactataagcccatgaagagtttccaatttggaaatggaattaaagtaacagtcctgtgatgttagatttatatgcagttttggttttgtctgaaatcgcatctgtgttagtccgttctcacactgccataaagaacttccctgagactgggtaatttacaaagaaaagagctttaattgactcacagttccgcatggctggggagacctcaggaaacttacaatcatggtgaaaagggaagcaggcaccttcttcacaaggcgacaggagagagaacatgtgaaggaggaactgtcaaacacaaagccatcagatctcctgggagcccactcactatcacgagaacagcatgggggaaactgcccccgtgatccagtctcctcccaccagggccgtccctcatcttgtggggattatggggattacaattccagatgagatttgggtggggacacagagctaaaccatatcagcatgtgatcctctcaacgttccaggggtctcgtaacatgccgggcctgtctgcagccacgctggcctctctgggtgggacttcctctcggagaggcagcggagacacctccatctccatcgacaccgaggcatccatcagggaaatcaaggtgagatgctctcttcttactgacaacttgagagaaccttttgtaaaaatcagtctttagattaaaaaaaaaaaagttaattcataaagttctggatctttcttcttggtcctctctccctcacctcccctaaaatacggtgttctcctaacatcaagacccagctcagatagtgtctcctgcaggaatctgatcctacccactgaccccccagcagggcggaccgtgtgccggccccctgcgcccctcagcacccggggaataccttagtgagagcacttggcacgttgtgttgatgcacttggtcgtctctgtatgcttggtctgcatagacattcagtccacaagtttggacaccagacggctttacctactttcacacaacccctccccactaagtatgttccccttcggcctagaacttgccctttcctttctctttgtaatgtgcctttagtagccctcatctttgtattttaatgattttttttatcccactgtagtgtaggtattattctctgctctatcctcagcacccaggacagtgccaggcatttggtagtattctgtgtgtgaaagagaaacacggtgctatttgttaaagtaactagggacagtgcatctgaaaacctgaagactggaagggcaggtgaggtgactagacctgtgtcctccagggagcagaaccaagacagaagcagctgaaaggagccagaactgactcagattctgaattttctagtgctttaaactaggtttaaaagggaagcaacttccactggggatgtctgagcagctggatggccgtttgccagggaggacggagagggatttaagcatccaccagagtttggccagggttaccttgaagatgcttccaacacctatgttttataagtttacaaaaccagaagagccatttcccatgtgccacccctgggccacctgcagctccttgttgcttccctttttttttcctttttcttttcttttctttctttctttttttttttttttttttttttttggagacaaaagttttgcttttgtcacccatgctggagttcaatggcacgatctcggctcactgcaacctccacctcccaggttcaagtgattctccagcctcagcctcctgagtagctgggattacaggcgcccgccaccatgcccggttaacttttgtatttttagtggagacggggtttcgccatgttggccaggctggtcttgaactcctgacctcaggtgatccacccactcggcctcccaaagtgctgggattccaggcgtgagccgctgcgcctggcctgttgtttccgtttctacagcagaacaccaaagttggcggcagtcctgatgtttctctgcccttaggttgcgcgtgccgttcatttgttcaggtacttactgagaggctggctggtgccagatgctgtccccggcaccaggaatttggcaaagtagagacttggagctccataaatgcagggaaaaagtgctactgatttttgcctctagcatcttactgtacattgcacagagtaggaactcctagtgcttgaatgaattactaaataggagttgaaataacctgtaccgttttccgaggctctattttgtctgttttttaaactgtgtaaaatcatatgagatacactaaaattgtataaaatcatgtaaaaatatcatatgggatacacctgaactttaatctttaaatattgaagtttattttcccttaacgcttaataaaataaaaaagaaaattgggtgctcagactacccaaatagaaactaccctgaagtataaaagatttagggaatcacctgttttcccttgacatcatctgccttttttgccatttcccccaggaactcaatgagttaaaggaccagattcaggatgtagaaggcaaatacatgcagggattgaaagagatgaaggtaccaattcacagacgtgtggtctcacgatattaacccaacttaacttaaaaaaaaaaacaacatcctaaagaagaaattcaaagtgcatgcttactgtaaataggctccagggtgtagaagaactcacaatggcaggagtgccggcatgggtgtacactcaccattttcccaaatgcattgtttgaaccaagattgaaaatgtaactgcccagtagaaaaggttactaacatactccctgatgcatgccttagacttaccatccttcccccaggcttaaaaccagtttctcatttcccataggcgtgtgccagacacttgaagaaggttcttggttttcttcactttttgtagtagttgtatacaaaaatgcttcagttgatttgcttctcaaaatatctgatgtctactaataaggccgtcctcacatgccacacttttgaaacatcccaattatttgcaccctgtaaaatgctactaattgaagtaaagactgactatggcattggctttcttggagcgtgtgcacactgcttttagagtgtgcagtgacttcattgcaccagccaggagatgtggttgccctgttccttgacagtaaggtgggcaatcagtgactgtcttccttaggcagcagcggatcatggatctggaagtgggtggcgtatctgttacttccttttcagccccctagaaagtacctgcaagatcatttgaatttaatatcaaagggcaccagacagaggaggtgacatcgatcatgactaattcactatcttcatatctgccacctttcctgaaagggggaaaaataagactctggctttcaattcatgcgaaaaggagccacttggccaggcgtggtggctcacgcctgtaattccacactttgggaggccgaggtgggtggatcaccggaggtcaggagtttgagaccagcctggccaacatggtgagaccccgtctctactaaaaatataaaaattagccaggtgtggtggtgcgcacctgtaatcccagctacttgggaggctgagtcaggagaatcacttgaacctggcaggtggaggctgcagtgagccgagatcgtgccactgcactccagcctgggtgacagagcgagacactgtttcaaaaaagaaaaaatgctgctggggagccactgaaccaaccggagacccgctggtcccacgtgaagcagctgtcctggtgtggaggtacagagctagaccagcactggtccctccagccccctggtagcctctgctgcacctgaactggcagctcttgccgctgcctttagctctgcatgtatgcgccctgaaggttctgcctctctgttttggaatcgccttcccctcctcatgtttggggacctgcaagggtgtgaggcacgtgagggcatcgccatgcgtattttacaggcctctttctctggactgtccttcaaagggaatgacctttgtctttccaggacctacccagtgagatctgcctgccattttcctatgagtcaaaaatctgaactcactactgctcctttcctggttcataagccagagtagggctggttggcagtcactggcttgtggccctatgtaattatctcagccatcacacactggctctttcacaagggctggtcacacgcctcgagtgattcttcagaaatctgttgaacagcctgacacccagccctaggacgccgtgctggggggattccccagctactgagtggggccagagactctactgcctctgtgaccacatccctttccatactggtatctcgtttgttctaatgagtgtgtccattgcttttaatagtgaattttctgagcaatgagaatttgaccaaattgaaaagggggatttccatgcatttgaaattgccatgtgtttcttcttctgatccatttgctctaagaaatatagtctaagtttaggactgagggtttttttttaacagaatactgaatgattctttgttttgatttttttattgcaatttcaaaaatatgacctgctttccacaggactctctagcagaagttgaagagaaatataagaaggctatggtttccaatgctcagctagacaatgaaaagacaaacttcatgtaccaggttgataccctaaaagatatgttgctggagcttgaagaacagctggctgaatctaggcggcagtacgaagagaaaaacaaagtaagcattagtatgatacagaatgttaacaataggctgcgtgcagtggcccatgcctgtaattctggtactttgggaggccaaggtgggaggattacttgagcccaagagttcgagaccagcctgggcaacatggcgagacatcatttctaaaaagaattaaaacaattagccaggtggtacatggctgtagtcccagctacttgggaagctgaggtgggaggatcacttgagcctggaaggttgaggctgcagtgagctgtgttgacaccactgcactccagcttgggcaacagagaagacactgtctcaaaaaaaaaaaaaaaaaaagggaatgctacggtgtgtgtgtgtgtgtgtgtatgtatgtatgtatgtgtggatatatcgtgtgtatgtatgtatatataatgtataatttacattatgtatttttatatttttaaacaatggctctccgcttatccaggaaatccaaactctgagaataaaagtaccatactctttgccaagtgacttgaaatattgatacgtataatttcaacatgtaaactgaagacagttttctaggagaacatctaagctaaaagcaaaaccatgaaaaaacatacctataaagagccaccatgctcagataaggtgcgatcagatgcttcaagattttcctattcatatgtattttctgatttttattttgttctctctcaacaccatagggaaatagttatgagtatcaaagattttaagaaaattatattattttctgctgattgggaaaagacacagttactctacttaagaattaaatatatcaccaagctcagagagagagatagtcttatctgagctttcattaggaaccactggaactagtttgttaatagctgagatcagatataatttctattgagagtctcaagcatgagtcatgtgttaagataagtaatgacagcggactgattccacgaaggctgggcttggatgttctttagatagaaagcaaggaatacttttttcatacttttaggaattgtccaatttttcagagattctgagaaaaacagaaaatgtaatgtgtgagtgtcgttgttgttgttgtttttaactggctattatcctctaaatccaaagggttaaaaccaaggtacccttgacaaccttcaggcctgcttcttcgactgctatagaattgagttggaagctgaagaacattttacgcacaaagttccttatagctgaactctgcaagaggggagcttttcacaagactgatgtcatgtgggaacggaggagtggagagcacagcccagccccccttcgggtgggggcctgtaatgcatatgcattcctcctggaatgctgtcattaggcatcattcagtggactgaaaactcccgagtctcactccagagaagctggatggtgctagaatgctgtcccgagatggacacaggggccatgcaaagccccacaggagggcccttgtcatagccaggagggcaccagccacccccaagctaaaggaagtgggcgaacagaagtgccagggtgagcagaagctcaggccagatcccatctcagatcacccgcctgacaggtctagggaaggagcgtcctgcaggcctgtaagctgtcagcaaagtgagttgggtctcaggccgtcaccagggattgcgctgctgtgactgggcaggaacacagcagagccgagctgccagcttcctgggctgagcctcaggtggggaggccaggcctgaggagcagctaggttttgcaggctctccatttgctcccccaaactctcctgtttttgtctcttaaggggcagccctgaagcacagagctggccaccagctgttcatgagagatgctttagtaggccatgtttatctcctttttatcccaaagagttttccttgtcatatttcagcaggggccattttatggtaagtccttgcagggcagcctcacccaggctctcagcacagtgctgtggaagacaccaggctccctgggggggcccttcgtcggctcttgcttcactgtagataagaaatcagaaaatccttgttgattgcatcaactcctcaggttaatttgacagtaagtcatcaggcatcatctataaagtccagaggaatctgtttgtgttgtttgaaagggcttgaaggccaggtgcagtggctcatgcctgtaatcccaacactttgggaggctggggcaggtggatcgcttgaggtcaagagtttgagaccagtttggccaacatggtgaaacccgatctctaccaaaaatagaaaaattagccgggcatggaggcaggcgcctgtattcccagctacttgggaggctgaggcagcagaatcgcttgaacccaggaggcagaggttgcagtgagctgagatcgcaccactgtactccagcctggacaacagagcaagactccatctcaaaaaaatatataaataaaaaataaaataaaagaccttgaagattgtgatgatgtagtagcaggtgatttgttccacagaaactataaatcgtgagagcctgaactggcatgccagaaacatgggattccactgctttagtgctgtttttctcctttacaggaatttgaaagggaaaaacacgcccacagtatactgcaatttcagtttgctgaagtcaaggaggccctgaagcaaagag

SEQ ID NO: 943 - DNA, 1015 bp, Homo sapiens
cttctttggtttaatgcaggatcaccagactctgtggcccacgacctgtttttgtgtagcccataagacatacctttctaagtactatagctgaaaaacatcaaaagagtagtaatattttgtgacatgtgaaaattatatgaaattcaaatttctgtctgtaaacctcactggaacacagccatgctcattcgtttgtatatggtctgtggctgctttctccctacaacggtagaattgaacagttgcatcagagaccttatggcctgctaggccagaaatgttaagccctttacagagaaagcttgctggctcctgtttaatgctttaactgccctactgaaaggcaggaggttgaaaaaatgatggtagtcaaaaggaatgcatgaaatcctgttgtcttctgttagctgattgcaagtagtacacaggatatatttgagacatctcttttcctatctcccaccaaaggataattcaggcggatctcagtgcacaggcacaggcatttgcctcattcttgttttgtctgttttgaatttagttatgggaatattttaatatctctcaaaaatagggtatctggtgtgagtcagaatgattatagaacatgcttgcctggagaacaggaaatgcgggatccactcctggtgtgctgttagctgaaggacgtcagaactgtcctttaacctccctgcaggtctctaaatggtaggattgtttggggattacactagatcatctctaggcaccgttcagctcagtagagacattgctgcatggtggaaggagtgacctcagtgtgaatcctggttctgtccctttctgcccaggagaccttgagcagcttatctaaatgctgtgtgcctttgttagctcatctgaaaatgtggctgtaagaatgacctcatgagaatggactgagatcatattcttaaaactcttggcactaataggtatttaatctactataactgtgaaaattatgtctgtgaactctttttttttttttttt

SEQ ID NO: 944 - DNA, 1015 bp, Homo sapiens; identical to SEQ ID NO: 943

SEQ ID NO: 945 - DNA, 130 bp, Homo sapiens
tgagacggagtttcgctcttgttgcccagactggagtgcagtggcatgatctcggctcactgcaacctctgcctcccaggttcaagcaattctcctgcctcagcctcctgagtagctgggattacaggca

SEQ ID NO: 946 - DNA, 527 bp, Homo sapiens
gttcctttaaaagccagcttttctactagaatcaacattatttgaattacatgcaattatatgagatcatatcaatgcataggaagctagacatgtattagattgtggttaagggcatacgctttggagccatataatatagctgtggttcaaagcctggctttgccatttacttactagctgtgtatgatcttggccttccatttcctcctgggaatgataataatacttgctgtgaagattaaatgaaattacccatgtgaaatgcttagcatggtacctaagtagtgccactctaaagtttcatggcctcctactctctggacacatacctatcctctgtctgctagaactcctcacttccctgttctcctaacttacttatccttcagagcccagttcaagggacgtcttcatgaagtcccccttgccccagccctgtgcttccacagggcctgtgcacgcctctctctgcttcccactgtgtgcgggccctacctcctccttttattgtgcttcactttctt

SEQ ID NO: 947 - DNA, 1239 bp, Homo sapiens
gggggagtaattcttagtcccatgttagaaagggggacgtgggacagaacaactgttcacacgtgaaatctagtgattggccaggctccgtgctaggtcttacattatcatttaattccagtactgtcctgagaactaagcattaggagaagcagcatggggctcaacagtgaagtgacttgttccaggcgggtcctcaggagtggctgtgcagccccagtcacttttcatcacaccggagagggacgcacaaccccagtcctgtttagttgcagatataccgagaagggagagcccacaccgaccttaagggcacttgggccctgaatcctatgcctctcgttccactgcttctcagttgccctcctacctggctggccaggtttggagtctctctcccctgctctggcattccagtcttggcctgaagcacgctatgcctctcatacagtctgccttttctagggtccaagcagcatcccaagttctgttgagatgcagcttgcagtccaggaggacaacggtcacccccatcttcccatgtttttcttgctttaagccctcccctaagctttcacatataatcaccaggggttcagaaattgtcagccagttctccttatgctttaagtagattttcttggggccagatgtcttgaaaaacgctctcctgactcagcagttcctggaatttttggcctatcatttatctcactgttctgagtttacttgtaagcctcttcgcttaatgtttgaatcaagatgagcagtaataacagcttcttgtgtaccaattactcagaactcacttaaattgccttaacactttttaaatgttcttacacatttgaaattctttagggagggatttccagaactttcctaaatttctccacccatggcatgacagtacttagaggggcaagaagttcaattttagaataagctcttctgggcgcgatggctcatgcctgtaatcctagcactctgggaggccaaggcgggtagaatgcttgagcccaggagtttgagactagcctgcaatatgcgaaaccctgtctccacaaaaagccagacatagtggtgcatgcctgcagtcccagctacttgggggcgctgagttgtgaggatcacctgagcccaggaggcagaggctatagtgagccatgatcgtgccactgcactccagcctgggtgacagagtgagacgctgtcgtctcaaaaaaaaaaaaaaaaaaa

SEQ ID NO: 948 - DNA, 2719 bp, Homo sapiens
ctgcccctgtgggccgcacctccaggacctgttcaccggccaccggttctcccggcctgtgcgccagggctccgtggacctgagagcgactgctcacagaccgtgtccccagacaccctgtgctctagtctgtgcagcctggaggatgggttgttgggctccccggcccggctggcctcccagctgctgggcgatgagctgcttctcgccaaactgccccccagccgggaaagtgccttccgcagcctgggcccactggaggcccaggactcactctacaactcgcccctcacagagtcctgcctttcccccgcggaggaggagccagccccctgcaaggactgccagccactctgcccaccactaacgggcagctgggaacggcagcggcaagcctctgacctggcctcttctggggtggtgtccttagatgaggatgaggcagagccagaggaacagtgacccacatcatgcctggcagtggcatgcatcccccggctgctgtcaggggcagagcctctgtgcccaagtgtgggctcaaggctcccagcagagctccacagcctagagggctcctgggagcgctcgcttctccgttgtgttttttgcatgaaagtttttggagaggaggcaggggctgggctgggggcgcatgtcctgcccctatttcccggggcttgccgggggttgcccggggcttttggggcatggctacagctgtggcagacagtgatgttcatgttcttaaaatgccacacacatatttcctcctcggataatgtgaaccatttaagggggttgttactgggctgtgtgagggtggggtgggaggggcccagcaaccccccaccctccccatgcctctctcttctctgcttttcttctcacttccgagtccatgtgcagtgcttgatagaatcacccccacctggaggggctggctcctgccctcccggagcctatgggttgagccgtccctcaagggcccctgcccagctgggctcgtgctgtgcttcattcacctctccatcgtctctaaatcttcctcttttttcctaaagacagaaggtttttggtctgttttttcagtcggatcttctcttctctgggaggctttggaatgatgaaagcatgtaccctccacccttttcctggccccctaatggggcctgggccctttcccaacccctcctaggatgtgcgggcagtgtgctggcgcctcacagccagccgggctgcccattcacgcagagctctctgagcgggaggtggaagaaaggatggctctggttgccacagagctgggacttcatgttcttctagagagggccacaagagggccacaggggtggccgggagttgtcagctgatgcctgctgagaggcaggaattgtgccagtgagtgacagtcatgagggagtgtctcttcttggggaggaaagaaggtagagcctttctgtctgaatgaaaggccaaggctacagtacagggccccaccccagccagggtgttaatgcccacgtagtggaggcctctggcagatcctgcattccaaggtcactggactgtacgtttttatggttgtgggaagggtgggtggctttagaattaagggccttgtaggctttggcaggtaagagggcccaaggtaagaacgagagccaacgggcacaagcattctatatataagtggctcattaggtgtttattttgttctatttaagaatttgttttattaaattaatataaaaatctttgtaaatctctatatacatctggtcattggaggttccagttataaacccatcttagttccacccctttcccctcaaagggggagcaggggtcaagtgaccccaacccatcctgccagggcagggcctatcttcctgcctctggaagacttgttgcaggtgggtagtgggtcagattccaggtaggatgaactgggagaagctggcaccccaggtctggagggggctggggtgcagcctccagctgtagctgcctcctgccttccgaaggcagaaggaatgaaagatgcacattctgggctgacgggcatggctagcaccatcctaggccacccacgaggggctcattggcatttgtcgtcgctgtcggaagggctgccctcccgggggaggccatgacgggagtggggcccccagagtgcatgcacctcagtggtctccgtgtcactgctgctggtggcactgtctcggaagctggcgaggggcggccggactttcacaccctgtgctgtgacagagccctcgatggccttccggagctggaaaggtgagagggacagatgtctggacccagatgtcagactcctccccgccttcctccccaggtgagctggacataagcctccatgactttttggaagtggagcagctttggaggccaccatcacctcacctcctttagagtaacgattccaatgagtctgccaatactggtgacataagcatggtccactcccagcagtgagaagatagtgtgagtctgcagtgtggggagaaaagcgattggacttgatggacgaggggcagctctaaatgacaggccacaggggcccaggacaaggttggtgtggaataggaggggtgccccagattgggagggaaggagacaggactgctggagggaaaataataacaatcgtaataataatgagaatgtttctgtgtccaggcctcaggaacttgat

SEQ ID NO: 949 - DNA, 224 bp, Homo sapiens
agatcgagaccatcctggctaacatgggaaaccccgtctctactaaaaatacaaaaaattagccgggcgtggtggcgggccgcctgtagtcctagctactccagaggctgaggcaggagaatggtgtgaacccaggaggcggagcttgcagtgagccgaggtcgcgccactgcactccagcctgggcgacagagcaagactccatctcaaaaaaaaaaaaaaaa

SEQ ID NO: 950 - DNA, 2075 bp, Homo sapiens
agcaaactgaatcagagaaggtgagtggcaaagcccatgtagctggtggcattactagaacttagcactgtgatgcacaaaggcttaactgggtttggcagcaagggtctcatggatactctttaagatgtaggcccagatctcttagtagtgaatccctgatgttccctctcttggggctctggtttagcaaggacagcgaggatactttcctctctccctcctccttactcctctctactaaggattaaggagccacctcttcctccttaaggcctttgggagagatgggtctcctggtattagaaaggagagcagacgcctagagttctgacctcttgggcctcccctaaacaaaaagcatagccccttcactaccctagtaacaagtatgacctgttgcctgttgaggtcaggtgtacctgtgtgtctctctctgtgatgtatgtgggcttggtgtccacatcaatgtgcgtgaatactcctacccacagactgctactgtgccaatatagaggttcataagaaagataaaagagaaccagcagaaccccaggttctgcctctccttcctccctttgcccagataaaggtgtacagtgtttgtggtgaggctgctggacactgctgttttgggctttctagagagaatgcaaacatgcaaaaacagtgtggtagtgtaggcagaacaagatctagaatcagaagacctggagtcgaatctcagctccaacacccactggatgaacgtggacaagctgcttgatctctcagatcctcgatttcttcatctgtaagatggaaacaatatgtgtcttttctaaggggaaagatcaaatgacatcatgtatgtgaaaatgcttagaaatgggtgatgatgatgatgatgatactgattattagggtatctaataaagttggggaaagaacaaaatccccccctcacaccctattgcaccaccagccttctccctccctgctcaattatacccatgttatagggaaggaaatagggaagaaacttgtctaaggtcacatggatgttcgcaacaattgggatgcagaacttgatctgactcccaggccaggtttgattttgatttgcagtggcagagaggactaattttttactaggttctgagccctgtactgaactctggattgccctgtacttggtggtggtatacagttcagcagtttttagcatatacacgaatttgtgcagccataaccactatctaattctagaacatttttatcacccccaaaagaaatcatgtacccatttgcagtcacttgccattccctcttctccccagccctgggaaaccactgacctaccttatatctctatgaatttgcctaatctggacatttcatataaatgcaattgtacatgtggccttttgtttctggcttctttcacttagcatgttttcaaggttcatttgtgctgtagcatttatcagtactttgttcctttttctagctgagtaacgtgtgggtatatcacattttgtttattcatctgttgagggatgtttgggttgtttctactttttgactattgtgattagtgctgctatgaacattgatgtacagatttttgtgtagatatgttttcaattatcttggggcatcttttatttttaatgtcagttttctatttttaaaaaatctagacaggttggcaaatcatttctgtaaagagtcagtaaatattttagcctttgtggtccatgacattaggtatacagattacaatttctgaactctgccattccagtgtgagagcagccatagataatatgtaaacaaatgagcatggctatgttccaataaaacttttaaaaagcaggggacagattgggcctgtggaccatagtataccaacccttaatctaaatgacacattcacatgatacattattctaaaggcacaaaaagcaaaaattctccctcccacctctgtcttccagctacggggttaccttccttgaagcagttaatgttatgagattttgtgtctccttttagacacagttaataatgagcattaaagtggctatatacta

SEQ ID NO: 951 - DNA, 2075 bp, Homo sapiens; identical to SEQ ID NO: 950

SEQ ID NO: 952 - DNA, 478 bp, Homo sapiens
actgggaacagcaggaaagggcaaggtggtgacaatctaagggaggcaaatggataataaccagcatggtagggaatcttctttgttgctgtggcactgtcgatctctgttccctgaactctagtgtcctccagactagatttaaggtgtggttccccgctaaattattctctcacctcctttcagtctttgctcaaacatccttttatcagagaggctttctgacatcctgtgcaagatagcacctctcccccatcgctgttatccttacccagtttaattccacgtagcatctgccaacgcttgacatatttgttttttgtttactttctggcctgtgacaactagaatataagctctgtgagagcatttttctcttaactgcttatcttcaagtaaacagaacagtgcctgtcctgtaggaagtgtttgatacatacagattgctcaaatgaaaaaagaagggtgcgagcaagcc

SEQ ID NO: 953 - DNA, 1011 bp, Homo sapiens
agtccttgaggaacagaaccctaaaagagagaacacctgcctaatctgactcctccatcagaataatcttttgaactcctgagatttgcccagtcattttggggccatgtctgatgaaagcttggtgatcccttttgggtcaaaaacaagctctgactgaagagatgcaagattttctcagatgatttgtgtgtcagtcagagttccgccagagaaacacaaccagtaggatatattctatcttgtctgtcttcatatccatgtatctgtcatctacctagatttaatgcaaggaattggtttatgcagttgtaggggctggctaggcaaatccaaaatccacagggcaggccgtgtggaagggaggtctggaaactctcagacaagacctgacattgcagtccactggtggaatttctccttcttcagggaaacctcagctttcaacggagtggatcagacccaaccatattatccaggataatctcctttacataaagttaactgattgtagatgtaaattacatttacaagataccttcatagcaacacctaggtcagtttttgaataactgggtattatagcatagccaggtcaacacgtaaaattgatcaccacagtccatgtcttgttaacttggcacctgtacacatttccttaaaccatttaatctcccaataaagacaataacaaagtaaaacttctgcctatcatgacacagctaatctgtgtacaactgaaaatatgctcttttcctgggagagaattcacagtccttgactggtgttcacttttatccttgataatccagtaactttaataatattatgtaaatgtagctattttaataaattttatgttagatgacaaggggataagagagggaagaaaaaatacataaacacaaacattcataacaaaacaatgaatactcataataattatagtactaacttctgcaactgttcacatgatgtgttttataactaccggtgttacaaaattactgg

SEQ ID NO: 954 - DNA, 478 bp, Homo sapiens; identical to SEQ ID NO: 952

SEQ ID NO: 955 - DNA, 1011 bp, Homo sapiens; identical to SEQ ID NO: 953

SEQ ID NO: 956 - DNA, 10995 bp, Homo sapiens
gcgccattccaaacatggcggctccactagggggtatgttttctgggcagccacccggtccccctcaggccccgccgggccttccgggccaagcttcgcttcttcaggcagctccaggcgctcctagaccttccagcagtactttggtggacgagttggagtcatctttcgaggtaatataagacatgggcgtctttgtccctagccttcccttttttctgaaacgtgaactgcgcgtacgcgtatctcctccagggatccgagcaactaattcacaaatggggaaactgaggcttaaagtaagtcacttgctttaggcttccccgtggcccgtattcaattcaggtctgctggcgggggcgcgtaaactcgacgtttgtggaaacgtgaacccgaagtttgcctaaaccccaaacttggaacccttccagattcccagccggtccttagtctcatccccgagcaccgtttcttgcatccctgcatgtttagtaagaggctcaagccttttcggagctgagagtttcactgctgtatcctgtatcctttccgctgggcttcacctttaaacgatcctaaagggactcttaagagcggaaattgacttaagttaccaggcgcagcttggtactaagagctgaggaaggaggaatgctggaggttagggagggagggaggcacaggtgacccaatctctcagttttgcccaaggagtttaccttgtagcaagaaaggtgaactgtatattgagggaagatagagaggtgaaaataagtgctctggtgatttccagtagtctttaaagtggaagatgagctattcctgtgtagtaataaagtaatgtacgttcaaattggagttaacttttccacattttaaatcccagttttgccgggcgcggtggctcacgcctgtaatcccagcactttgggaggccgaggctggcggatcatgaggtcaggagttcgagaccagcctgaccaacatggtgaaaccctgactctactaaaaatacaaaaattagccaggcgtggtggcgtgcgcctgtaatcccaggtactcgagaggctgaggcaggagaatcgcttgaacctgggatgcggaggttgcagtgagcggagaccgcgccattgcactccagcgtgggtgacaagagctcgactccgtctcaaaaaagtaaaataaaatataaataaataaaaatcccaactttgtgacttttgtattgtatctaatagcacagtggtaaatgaatataatttgcaagcgattattcagactgcatggacaaaatgcttttaccacacggatgtacaaagatttagaaataaatgatttgagatggagtctcactctctcgcccaggctggagtacagtggcgcaatttcggcttactgcaacctccgcctcccgggttcaagcgattttcctgcctcagcctcccgagttgctgggattacaggcacctgccaccatgctattttttttattttttagtagagacagggcttcactatcttggccaggctggtctcgaactcctgacctcgtgatccacccgcctcggcctcccaaagtgctgggattacaggcgtgagccactgcgcctagccagaaataaatgatttaaaggacagaccgtttaggaggaggaggaggagacacctttgaggtggtgctaagtggtaaaggaaggggctggtgaactttagagcagcatctagcattgtgcttgaggggagctggctctcagtcatgggcacttgctgaaagactggccctgtacaagtcttagccaaagttgactcccagcaccctgctgcttaaaaacgtacagtggctgcttgttgcccttgagataagatcaagatgtttagtgtggtctcccaggctttgcatgttgcgttctctccttcagactcgtttccttactgcagccacacaagactttcccacgtgtaccatttgttttctctttgggcttccaggccgctcctcagctcactgcatcacttcctcagtggacccttccctggccttctttttaatacttaccattaaattcggctccatgaagtcagagactacctgttttgtacccccacccctcacattgtgtaacctgtagtgctaatacagtggtagtagatagcaagtgctagatgaatatttgtcagacattgaaggaatctgtagtgtggagcctgtagtgtagttggcttgtgcacagaactccttgcctgattcacatatatgtctgtaggtgcccttgagagagaactccctctgggacttgattatccatacagagaatacagagaaaaccagtccctgccttcaggaagcttgtaataaacggcaggcagttgccttgttgtaggatcactgctctgatagaagaaacctggggtactgtgggagcacatataggtgtggacatcaaagaaggcttcccagagagcaggaaagccaaagaagcattttgacttagccaggtgaaggggagtgggagtggtgcgagctggatcctctctgctgctgggtgatcacgatctgtctagtcttgtctcacgattcaattcaaaggccacattttctttggaacttttcctgtttccttccttgtgttctgtgtggacctcaattttcacagcctccagtggcacatagcagcacctacttacctgcttctcattcctattggggtgccactccttgaggtctctgtctgctcattctagctgcttagcacatgctctttgatggaaggaatttattgagctcatgcactcttgattttggagggaacgttggagaccatctagttccatttcctccattcataggtagagaaactgaggctcagtgagggcaagttacttgctgaaagccagccgttgggtttgtggaaatgaggacaagcacttactttccaggcaaaggctctgttttagccatgcttttaaaaagctgttctctttctaggcagatgcggtggctcacgcctgtaatcccagcactttgggaggccaaggtggctggatcacttgaggtcacgagttcgagaccatcctgggcaacatggtgaaaccccatctctaactaaaaatacaaaaattagtggtctctggtggcacacgccttaatcccagctacttgggaggctgaggcaggagaatcgctgaaacccgggaggcagaggttgcattgagccaagatcgtgccactgactctagcctgggcaatagagtgagactccatctcaaaaaaaaaatatatgttctctttctaagctaccacacattttcttcttaatacagctgtccaactgtctataaaggcctgtgtatcttttttttttcttttcttttcttttttttttttttttgagacagagtctcactctgtcacccaggccagagtgcaatggcacgatgttgggtcactgcaacctccacttcctgggctcaagtggtcctcttgcctcagccttccaagtggctgggactacaggtgcgcaccactacgcctgactaatttttgtttttgtagagacagggtttcaccacgttgcccatgctggtcttgaactcctggactgaagtgatccacccatcttggcctccaaaattgttgcttacaggcgtcagccaccatgtcggaccctaaatttttttcttgagtgggtggagggcagtaaaattcttgagatgagatttcctgccaccctgtctggtaggcctcctggctcaggggagctggcccaacttttttggccagtttgtgactggttggcctattaatgggatgttttccagtagccataggtctcacaaaggaagtacatcctacccacatcccaaacccaacaagagtcaactttcgttttttttgagacagattctcgccctgtcacccaggctggagtgcagtggtgcagtcttggctcactgcaacctctgcctcccaggttcaagcaattctcctgcctcagcctcccgagtagctgggactacaggcacgtgccaccatgcccagctaattttttgtatttttattagagatggggcttcaccgtgttagttaggatggtgacttcgtggatctgccttcctagttaggatcctgacttcgtgatctgcctgcgtgggcctcccaaaagtgttgggattacaggcgtgagccaccgtgcccagccaggagtcaatgttcaaagtaatcctgagaatgggcaatctgtttttctgatttactttctctgtaaatcaagcgcgggagctgcaggcaggcagaatttttgctcgttaaagggccctcacatgtaggtaatgttctaaatttgagctcagatctgtctgcctcacaccaagtgtagtttgctgattgctgacagagctccactttcctgtgtttgaggcttcttttctaactccttttccaactgccatgctgttctctttctgtgcctccccaatctccctgcccacttcctgcagtgggcctgctttggtacatttccttagagttgcttgtgcacagagctccttggctgattcacatttgcatctgtataggtgccctttagagataactctctctgggacttgattatccatgtgataccaaccttgtcctcttaggccatccagtcagtaatatgtgttattaaacacttcccttgtgccaaggcagtgttccaggcactaggaggacagtggtgaataagacagacaaaattctcatctactagtaggggacagataataatggatgaaaataatggatatgatgtcagttaattatgtgaaaaacaataaaactgtgcttgggtgtggagcatgagcaggaggggcacagtttagaaagggtagaccggctgctgtctctgagggggagaagattgtcctgagtcctgaatgggtggtgatgtgagttgtgtaagcaccagcaagaggccacagtggggctggaagagtgtctgggcctggtgtggaataagatacagggaaggggcatgtagtaggacagagaccagatgtggtgccggctcgtttgcctggcgcttcctccatgggcctaattaattggtaaactcagtttaccagatgtttccattggcatggtgtcttgccatctcatatgcaaacacagatgctgccacctcatcagatgacttcaggagaagttatttcttcctctggagtaagatttttgatgtataaatgatatttttttctttcctatgttttgattacacaggcttgctttgcatctctggtgagtcaggactatgtcaatggcaccgatcaggaagaaattcgaaccggtaagcattccctctgtgtacacaatgttctgggcttcagcagtatttcctagttgctaattttatacttcatgtgtttcagtcctgcttttatcctaagacaacatttcagggactaaaatgtgtgcacataatctctatgagctgctgatttttggttcagtttattaattgacatatcacccataacgaatcatttataatgaacttttcgtattcgtactaggtaaagaagaagaccaatagtgtgtactgctttttaaaaaaattttattatttttggaataggtcttacagagaaaagtctcttgtgcttctttttattccccaagttctgtccctaaaggtaaccagagcttctgatttcttcgtaccatattttacatgtttttttttttttttgatggagtttcactcttgtcgcccaggctggagtgctcactgcaaccaccacctcatgggttcaggcagttctcttgtctcagcctcccgcgtagatggaactacaggcatgcactaccatactcagctaattttatatttttagtagagacggggtttcgccatgttggccaggctggtgtcgaactcctgatctctggtgatccatctgtctcagcctcccaaagtatcgggattacaggcgtgagccaccgtgcccggccttatatgtgccattttaactgtaaattatgatgctgattgctggatctctgcattgtctctttttttttttttttttttttggagacagagttcttgctctctcacccttttaagaaaggagtgcagtggcatgatctctgctcactgcaacctctgcctcctgggctgaagcagtcctcccatttcagccccccagtagctgggaccacagtgtgagccaccacatttggctaatttttgtttttttatttttttgtggagatgggatcttgctgtattgcccaggctggtcttgaactcctaggctcaagcagtcttactgcctcagcctcccaaagtgctgggattacaggcgtgagccaccacgcttggcctctgccttgtgtttttttttttttttgagacggagtctcactctgtcaccagtctggagtgcagtggcgcgatctcggctcactgcaacctctcactccctggttcaagcgatccttctgcctcagcctcttgagtagctggattacaggcatgttccaccacgcccagctaatttttgtatttttagtagagatggggtttcaccatgttggccagggtggtctcaatctcctaacctcatgattcgcccacctcggcctcccagagtgctgagattacaggcttgagccaccatgcccagctgcattgtctttttaaagaagatctcatggcttttatgctatattaatatctctctctttttttttttaacctgagaaaagcataacttatctgctgtttaatgttggttaacacatgagaagttgggggttatgattactgctgtggccaagattaaaatccctgagttgtctatgagagggctttgtttttacattctgattattcatttatgagggagataaatgagtctgttgtttttcttattttaataattttgttcctttttttttaaggtgttgatcagtgtatccagaagtttctggatattgcaagacagacagaatgttttttcttacaaaaaagattgcagttatctgtccagaaaccagagcaagttatcaaagaggtatgaactcagttttctcctcagctctataggaagaactaagtggtgccaggattccttttatgctttaaatgagatgtaaccgtttcctgcgagtttcattcaggctttataggtcagtgtgaaatgtggctagtcatccatgtttgggacaacctgaacaagaagtaaagccaaggagtggggtccgaaagcagagtgtcagacggaacagctctgatgtgacttgtgtcatacattggccttcaggaaagatttttcttaaaagattctgccatgtgaaaaaaggacaaaaagccactaacatataggcttgttttggacaaaaactgagatctgtgtccccacttgccttacccagtgccttgcacacaggaatccaaggaatcaaaaagtagtgttcgacccaggttcctggaaactcaggatttcgttgatctcagttgttctaagctagggcatttggaagtgtgttggggttgccacgatgacttgggaagctttaatggcattgaatgggttgggccaggacctgccccatgtgatgtggaagagtgaagaatcatcctgcccaaaaagccggcaatgccctcagtgagaaacactgaattgagattattggttgggggcaatttttgaagtaactagtcccaattaatcaaaaagtctcttttcattcatgataccagctgttggggatagctattcttacagtttatcatgtcagatcatttcctgatgtgaatacttgaataacagtgcaggtatgtccaagactggatggttagtaaaggatgtaatgctgttcttaaaaagctcttgaaaatgtaattttaacagttcataatctgaagtgatagatcagtggtgtggattttcttgtaaacagttgttaacaaatgtttcagattttcagtgttttaggttctcagcagtagcctttggagagaggtactggatggctggggaccaggatgggatagagtctgtaattagtctgttttcaccctgctcataaagacatatctgagactgggcagttcacaaaagaaaaaggtttgatggacttacagttccatgtggctggggaggcctcacaatcatggcagaaggtgaaagacacatctcacatggtggcagacaagagaagagagcttgtgcaaggaaactcccatttttaaaaccatcagatctcgtgagatttattcactaccaggagaacagcatgggaaagacttgcccccgtgattcaattacctctcaccaggttcctccctcgacacatgggaattgtaggagttacaattcaagatgagattgggtggggacacagccaaaccatatcaatctgatttctttttggctgcccttttgaattttgtaacttgcatattactttctataagaaaaataaacgtaggccgggtgtggtggctcacgcctgtaatcctagcactttgggaggctgaagcaggtggataacttgaggtcaggagttcgagattagcctagccaacatggcaaaaccgcatctctactaaaaatataaaaattagctgggtgtggtggcgtgtgcctgtgatcccagctactcaggaggttgaggcaggagaatcacttgaacccgggaggtggaggctgcactgagccgagaccgcaccactgcactctagcctaagtgacagcaagacttcgtctcaaaaaaaaaaaaaaaaagcccataaaaacttatgttagaatctgtcatctgggttaatcaaatagtggagccaagcagagtaatgggcttaatatggtttaatggattctctttgttttgaattgttagcctcttaactaaccagaaccgtatgtgtttttcctgcatttgctctgacttagtccatgactttcatctgcaggatgtgtcagaactaaggaatgaattacagcggaaagatgcactagtccagaagcacttgacaaagctgaggcattggcagcaggtgctggaggacatcaacgtgcagcacaaaaagcccgccgacatccctcagggctccttggcctacctggagcaggcatctgccaacatccctgcacctctgaagccaacgtgagcaaagggcagaggcagttggcctatgagtgggctgatgcgtgaggttggccacacattccttcctgtggacttgacattttggaagaactctttgccagataatgagttcattttagttttatgctcccattgaaaaattttccactatttttataagctgttaatttcttgagtactttataacatgtctgtagcttggataaaccaagtaagtattttttttttgtctttagcaaagtttagactgtgaatatgatgacacagattcttttttatggtggctttgcttgttttaaatttttgcatgacttttcatctttttatgtgtgtttcctgtagtttgatccgaaggaaaagagtatagtagcctgagaatcaggagatgggagttttagtcgtaggccttatgataattaccccgcggtggtgtgtagaaaagtatgtaaatttgctctgttttaagactttgaactacctcaagaagaggaatctaatacaatatttgtaatgtttccagagctctcagaatgaggatttttttgtaaataggtcagaagacgatggaactgtcctgggttagtatagtaatcttacagtaggatccttaggttgatgctgacttctgtttggggtatgtttatattttatgtggtgtttactttttttttttgacatagaaggatatagtgggagcagtgatacgctaacattcattacattctgcagtaatgaatctgtttaatgggtcagtcactgttttcagtagcatgacagtggggtcataggtgagctgtgaggggctaaatcttgctctgattgtctctttctgttttgagttttgtttgcgtgtatcatttttgttctacattttgggaggggaaacattttccgttaaggaaggttgttgccagtggatttgactccaagggactagagtgtcgtggtgggggtggggaggggctgcagggtgatcattggctactgagcctccacagagagcatgtggtgccctgcctttgggagggtattttgctctcgttagttttgtgggcagcctcagattccctgttgagttgctgttaagaaatggagatttctggctctcattgggtaaggttttctgagttttatatcttattagatcacatccctttacccagaacaaatgcttcactgtcttctgattggcagtactcctgtggctttgtgccttgactcattttgttgtcttcagccttgaaggccccttcccacatggactgacatccactcatgtgcctgatccctgaagcctcccagcacccattcagttgcatccccagggcacaggactttgatctcttctgttgccctcgctaggttctccctggtgggttagtgctttgtatctgtctctctgcccctcactaattctacacccatgagaattagacattattctccttaaatatataaggaccatataatctgtatctttttggtgtgtgtatatggtatctggcacatggatctctgattaccagcctgacatcaacaaatcccctcagttacaacgtataggttaaacaaagcttttaaaagctcatgtggtatgacctcaaggttgctaacctggtcactcatggtaattagaaactctgattggcagctttgtatttcttgactaaaaacctaaataaactgattaggttttaggcgttctttcaaagaggttcttgagaagattgagaactatcctatttggtgcttagtgaaaagattttgaattactgtacgtaccagttgttgccatttctttattaaattcagaagtttttttgccaaataacaatttt

SEQ ID NO: 957 - DNA, 1986 bp, Homo sapiens
ctcaaaaaagaaaaaggagatgttgaatgggaagtcagcaagggtgctagaatgtagcaagtattcttcaggtgttagtgatttctgttgttcgggaagaggagggttatggaggaagagtatgggatttaggtgggttaagtgatttgcccaaagtcaagaggttagtctttaacctttggcagaagcaggatttgaagtgagttttcacacccctcttccctggtcagtgtgttgataacagcccacccacctgtggttccagggtgttcttaagaagccaaggttgtcttgggtgtggtagctctttgaaaggtagaaagttccaccaagaaggccttttttcttgaatactgcttagcttccttgtcaggctccaagatgcagattgcctgtgggctatctctctccacagataaacctactcacatcttcaggacagccttttttttttgagacaggagtcttgctctgttgcccaggctgtagtgcagtggcacaacggggtcccacaggcaagtgctggggaaaggcccacccagccatcaggtagcctgtgtgttctacaaacagcagctggcagcactgtctcctgccggacattcctgccacccgacatcaaagctggtgggtgaccttttcagccatttgacattcctcccagaagaacctctgcctcccagaggtttaagcagttctcctgcctcagcctcccaagtagctgggctatttttttttttttttttttgagatggagtcttgctctgtcgcccggttagagtgcagtggtgcaatctcggctcactgcaacctctgcctcccgggttcaagtaattttcctacgtcagcctcccgagtagctgtcaggtgcacaccactacacccagataattttgtatttttagtagagatggggtttcaccatgttggtcaggatggtctcaatctgacctcgtgatccgcctgcctctgcctcccaaagggctgggattacaggcatgagccaccgcgcccagccttaatttttgtatttttaatggagatggggttttgccatgttggccaggctggtcttgaactcctgacctcaagtgatctgtccgcctcagcctcccaaagtactgagattacaggcatgagccaccgtgcccagcccatcttcatcttctttacttgaacttaattctttttcatgcatcttcccttctttcctcttttctcctccacccaaatgtcttaactgttaacattcccaggtgtttggtcctgggcctctggaggttgtgaaggagcactgctcagtcctcccttcaagaaagcagcttcaaggagttcaattacaaaagctcctggcattggggacctgccgccatgttcctgcccagggcatgctggtcctggctgtcaccaagcacagtggaggtcaggtgctaggccatttctgcccgacacaggcctcctctaatgagcagtctgaggccaggcacaggaggctgaggcaggagaatcgcttgaacccaggaggtggacgttgcagtgagccgagatcgagccactgcactccagcctgggtgacagagtaagacttcgtctcaaaaaataaaaaataaaaaaatactgagcagtctgcttgggcgcttccatcagcctggccatgacatctttggagctgtcctgccctcttttgccccggtgttccttggcccacctgtcagacctacatcataggctcttcctgtcttctgtttcctctcccctttctctaacataggtgtttctcctgagaaagaaaaaaaccacctgtccctgacattcagaagctgacaacactgttcggtcatgccattctcctgttggacataaacagtctctgaatgccaaccccaaagttgctctcaggccatgataaaataaaccacttaataattttgtctaagcacgtacaaagaaaattcaaggtcagtttaccactcacaaaataccaaa

SEQ ID NO: 958 - DNA, 593 bp, Homo sapiens
ggctgaagtagggggattgtttgagcccgggaggtcgagccctgatcatgacactgcactccggccagggcgacagaacgagaccctgagaaaaaagaaaagaaagaaaaaaaaagattagcatagtgactttctctttgatgtaaccataaatatttaaagacatcagtgccgggcacattgggaacctcaacaaagttgtttccgttatccatctccgaccagaattcaggaagaactttgcctgtcttgttcccgctataaccaatgactcaacaaatgtttgtggagtgagtgggtgaccctctccttttaccaacggtaaacagcccgcggaaagaaaaagtgacttagccaaagtctctccaggcatttggggcagagtcgggactagcatagtagtatcctgactctcgcaggagggctcgctccactgtagttattaattctcctctccacacaaccaggtctaatccggccaaagtcttcaattcttaagctaagaaaaaaggaaaatacatgtaaactctgttttgcgatagacaagaaaacagaagaattaaaaatcctccttccggggtgcaccagaatcc

SEQ ID NO: 959 - DNA, 5033 bp, Homo sapiens
cgcagaaccaggaaagtaacggctacagacagtgagaaatagtttcgctcgccggctagaaaaactctgtcggtaccaaccccagagcgttgagagcagcccacctccacgcttccttaacggagaggtgcaggactcagacttcaccagcccactcggtcccagccttgtacgcaaagagacgccaaggacgcgctctcccgcgtccaggcagccccagcttgctggcttgcctgcccgcctgcgtgcagcactcggccggcgtgcagcatgaccctgtggaacggcgtactgcctttttacccccagccccggcatgccgcaggcttcagcgttccactgctcatcgttattctagtgtttttggctctagcagcaagcttcctgctcatcttgccggggatccgtggccactcggtaagggtgtcctcatagtgcaggtagagtgggggaaggctcatgggcagattgtctcctgagggacccaggacaggtaagactgtacaagagcctccatgaatagtcgaattgaggctcaggtggagtgaagtcaggagtctggtgcagcaagcacccctttccaaggatagggagagctccccatccaggatatcctggagaaggaccccagctgggtccttgggaaggctgctgcagagaatgggcacccagtccagtaatcctgaggaacagtataggcttcttgtgctggagggcctcccacctctcccaggactaaagctgcactctcatcccatccggtgggtgatgaccttcaggccaaaaggacagatgccagcagctcagactgcagtgttcccctttgcactgggttgagacacatgtgtatgggtgcctcatcctcaggactgagactcccacattggattagaagttggagccaactgggtgcattgtcttagactttccccctctcccagaacctaggttgtgcatttttcagttctgggaggacccagcttttctgcatcttaatctgtgttgctttccctggaactggtgcacctaggagtatctgcattcccacctcctcccctcggagatcaggctggggcctccctcttctgagggaggtgacccctgcgtgcctagcacttctggactcactgagcctcaccaagcagtgactggaccaggaggcagaaccaggaccaggcgccagacagctaggggagtgaaggtggtggaagagtgccaggaagtgggggtggaggggaggtgctgttagggtagatgggaaatggggctagggaggtgaaagtgcgtggtcacaaaatatcagaaatgccagtagcccagagggacttgcaggaaaagcgtgcctaacattagtctcaaaagtctggatataactaaagatccaggtgaagtggggtcaagggtggtcttggggactctggtttggcagggctcaggcctgacccgggtgcctattcctgcagcgctggttttggttggtgagagttcttctcagtctgttcataggcgcagaaattgtgggtgagtgtgtggtgcagcccatggggagaggacggggtgaggaaggaggtgggcagagggcacctgggacaatagggaactggggttggttttctgctccctcttcccactctccagctccttctagggcccactttttggcccttaccatgcaaccacattggacctctaagtccccatctctctgcagtgtcccacctcccataccactctctaattccattttcccaccctcatcccacccccaccgtgtgcctttccctacagctgtgcacttcagtgcagaatggttcgtgggtacagtgaacaccaacacatcctacaaagccttcagcgcagcgcgcgttacagcccgtgtccgtctgctcgtgggcctggagggcattaatattacactcacaggtgagggggctggggctaaatgaactcctggagctgggagatccccggttaggtgagtgtgtcagggatagctggagggcctctcacatcccacaagctcaaatagcttgtggtcctcgtggatttgcgttttctccaaccaccaccgaacccatttctcccgccgagagcgccacacccccactttcctgtctgaatccgcttagttgcgaggtctccgaccgcgggcagccccatgagcccgcctcaccccacagggaccccagtgcatcagctgaacgagaccattgactacaacgagcagttcacctggcgtctgaaagagaattacgccgcggagtacgcgaacgcactggagaaggggctgccggacccagtgctctacctggcggagaagttcacaccgagtagcccttgcggcctgtaccaccagtaccacctggcgggacactacgcctcggccacgctatggtaagtgctggagggaaggctgtgtgcacgtgtgtgtgtgccaggagctgggccgtatgagcgggaggatgcaggcctcggaggcgctgagcagctgcagccagacccgacgcgctcggggtgggcatgacagcctcgcgggttagaagatccacgagatctgcacagacggaatccggagagactccagccaccgcctggacctcaggagcccgcttctcccccggggaattcccctgcaccgctgccatcccagtccctggctttgacgctggggtagggataaagaagagcgcagctgtgggaaccccggtgggctgggagaagcccgctcacagcgggtccccccactccccggcagggtggcgttctgcttctggctcctctccaacgtgctgctctccacgccggccccgctctacggaggcctggcactgctgaccaccggagccttcgcgctcttcggggtcttcgccttggcctccatctctagcgtgccgctctgcccgctccgcctaggctcctccgcgctcaccactcagtacggcgccgccttctgggtcacgctggcaaccggtgaggaccgagagaatgggccccgggggctaagggtggagacaggattcacaccgggtgtgcactttccagtttacagaatgaattcacatctattaccctatttgcccctctcaatagttcgcagaaacaggcactgttatgaccattttacagatgaaaagtggggggctcagaagggtttggtgtcttgccgtgtttcatgtaattcagattagaggtgtgtggcgggaggtaacacaaggggtaggctccaaaagatggaagaaggcccgggcatcacgcctgtaatcccagcactttgggaggtcgaggcaggaaggtcgtttgaggccagagttcgagaccagcctgggcaacatagccctgactccacatgccctcctttctttcgatccccaccgccacaggcgtcctgtgcctcttcctcggaggggccgtggtgagtctccagtatgttcggcccagcgctcttcgcacccttctggaccaaagcgccaaggactgcagccaggagagagggggctcacctcttatcctcggcgacccactgcacaagcaggccgctctcccagacttaaaatgtatcaccactaacctgtgagggggacccaatctggactccttccccgccttgggacatcgcaggccgggaagcagtgcccgccaggcctgggccaggagagctccaggaagggcactgagcgctgctggcgcgaggcctcggacatccgcaggcaccagggaaagtctcctggggcgatctgtaaataaacctttttttcttttgttttttaaaaactgtttttcccattaattttcatggcttctccgcgccggggtcgcacgtcctcatgagcttcgctgggctggagacagcctagtacactctccgcagtgctgtgaaacctgattctctgcgtcgactccagagtaataggggcgccctctagtgaggccggagggaccctaccagagctagcatctttctgaaccaccccagggggacgttaggtggcagtgatgaggcaggtcacccactcccccgtcctggatgccactcagctagcccagctgagtggggtgggaaggaatagcgttttggagttgattccctaacttcccacctggcttcttgtgaggtggtgtttgagggccaaggtaggtgtcagcaaggcatagaaagataaatcccaagattcttggcaagtcttgcaatcttatgtagcaaatttgggaactgaagctcaaagagaatgtggcatagttggttaatgttagacctaggatgagaagtttggtttcccctcctttccagtgctgtctttcattgtaccaaaaggccacacaagctggagaagtaaaggaagaacaaaaggaacccaggaaaaaggaaaacaagaggtgccgagggatgagaggaaaccataggagaatcatatgtaacccccaccctgctggtgttatgggggtgaagttaggtttcagtgaatagcatcttgaagaggcaaggcagcacggaaaggctgggttgctgtgcagataagctagcccctgcttggccttatcatggcaacaggctttatggacaggcccagcatctcttcagtcccttagggctttttgttttgttttgttttttaacatcagtatatagagcctcctttttctactccgtctgtagattggtgctgggtgtctggtaacagccaccctgagggcagttctgctggttttatggggcgccaatgaggtttggagccagactggaagtccaggtggcctccacggggaggaatgttataaagcacaatcaggatctttggggtgtgcctccttacagtatgccttggtggaggaagcctctgacaggggaatgtcctgggacttgggactgtcagccatggaccggtagcgggggctcaggagtccaccttcctcaggactccactccagcatggggtcttcatccacactctggttgaagaaagccttcagcctgtgaggctgcatcctgtgggccaccgccatagccaggcccagcagcacacacagcagtcctg

SEQ ID NO: 960 - DNA, 134 bp, Homo sapiens
cccgacctgcagcccaatatcagcgctgatccactcagaactgaaggccttgtatgatgtgttggtgctgacctggcccacagaccactcagaactgaaattcacagctgtggttggggagttggacatatggg

SEQ ID NO: 961 - DNA, 8896 bp, Homo sapiens
cggtggcggctgtgtgtcgccggagccgaagcgcgcaggcccgtcccggtggccggggagcgggcgggtgggggcgccatgtggttcatgtacctgctgagctggctgtcgctcttcatccaggtggccttcatcacgctggctgtcggtgagactgcacgaccccggcccgcgcgggctcccgccccggcatcggtgctcgttgggggtcgcatcgcgggggtttcggagccactcgggggaccactgcccggcgctcccggccttcgccgccccaaccccttcccgcctgatcctgcccctcctgtcgagcctggcagcccggcctgaccgtggctccttccaggtgtcacagagtccgctccggcactgcccgagaaagggtgactcgagtgccgcccccgcgtctgcggaccgctaaccgctgcggctcccactcttcgcgggcctgccgcgcggaacttttccccaacgcctaccgccgcctttgcgcctctggcccttcatgctccctgctctctccacctttgacacttctcctctggctggttcccattcggcctcagttgagatgtcatcttttccgggaagtccacaggggttgatggtccagcagtgccctgtcctttccctaaagtagcatttctcacactaaactcgtctgtctctccctactgttccccttccctttcccaagctgggtcagggaaggacccttgtctgtctttttcagctgtattctcagcccagggacctggctcatgccaagtgcccagcaggtgtttattgaatacgtgaaattccgttttctgagccagaggttatcattgtactgtggcatcaaatgcagactttcgttgatttttatgagatttgtccttagttgccctaagaaagttttacttctccagacttggaagggcaacacatgggatgtttggtttgttcttgaccttctggggtccatgaagggtggatggggactgggctgcagagagaggggtgaccaggatggtgggagtgaccctggctgatagtctccctgcctcccaccctgcagcggctggactctattacctggcagaactgatagaagaatacacagtggccaccagcaggatcataaaatacatgatctgggtaagtggcatctttctccaggagtcctcctcactcttttgccctgcctcaaaagcaggaagtggggagagtttggcatggatgatgaggcctgtgtctctgctgtttcctgagcatacactcttacctccttgccctgaacgctgtcttttgggtctgcactcctgggcccagatcttccctggccgccttccccaagtggcattgtttcactgcaggccttgtgctctagtccttaaggtgacagcgaagtgtacttctctgttgacaagaccgtagatttgactttgcttagctctctcccgctgtctttagccctttgctctgctcacagcatttaaaacttagaggagccataagacagttttgcatatatgttcattgccatctttctaatcggatcaagtgatttgtcctaagatcggcacagcttcgctgccctcgcccttccctggtctcatgggaggcttctcttactgaagacacagtccttgccactgatatcaaagccataggggtgactgctggtggacagacttccttcagctgcaggaaaggctgggggtaggggtgccattggagagaaagcgtccacagcccctcaagtcgcctggtgtcagcagccatgtgcactctgggcatggctgaggttgggagttcacagtggaggcaagactatagccctcagctctggtccagaggcccagcttgtgggtgttggcacagtaattagcccttcattcagccaactgtcatttgctaagcactgacaactgtaggtacttatcagtagtgtttttcaaactgtaggcatgattcattatttggctgtatagtaggtcacaatcagcattttttaaaaaaaggaacataaatagaattgaaatttgagctttgaatcatatatatgtatatatgtgttggggtcacagtgtaaaatgtttttctttttctttttttttttttgagatggagtttcgctcttattacccaggctggagtgcagtggcacaatctcagctcaccgcaacctctgcctcctgggttcaagcgattctcctgcctcagcctcccgagtagctgggattataggcatgtgccaccatgcctggctaattttgtatttttagtagagatggggtttctccatgttggtcaggctggtcacaaactcccaacctcaggtgatctgcctgccttggcctcccaaagtgttgggattccaggcgtgagccacctcgcctggcagatgtttttcttactgtgggttgctgtcaaaaagtttgagaaatgggctgggtgcggtggctcacacctgtaatcccagcactttgggaggccatcagaagtttgagaccagcctggccaacatggcaaaaccctgtctctactaaagacacaaaaattagctgggcgtggttgtgcatgcctgtagtcccaactactcaggaggctgaggcaagagaattgcttgaatccaggagatcgcgccactgcactccagcctggatgacagagtgagactccgtctcaaaaaaaaaaaaaaaaatgttgccttttgggagcagagaacctagctggggaggccagacctgtgaaatgaggagattgaagcatgaacctagtgctgcccagagcgggctgggggttggtgagtccaggaacgttgcctggaagaagcgccctgcactgtctgcctctggttgtttcagttctccaccgctgtactgattggcctctacgtctttgagcgcttccccaccagcatgattggagtgggcctattcaccaacctcgtctactttggcctcctccagaccttccccttcatcatgctgacctcgcctaacttcatcctgtcgtgtggtgagaggggacagagttggggaggcagctgatgtggttgggtgtgcccatctccatcctgggcactaaaggggatacagaaaaaggaagccagctgttgaagtcctccaggaagccaggctagttgggaagatgcggttcttactgctgaggactctagagcccaccttggctctagtgaatagaatttgttggggctggggactcagacagggagggctttcccagagaggtaagtttgaaggagagtttgggaaagaagaggttgtggattggctgaggcagggcccccaactgagcagttccagcctcaaaaaaaccacttggccagaaaaagcccaaagcccttccggtaggcaggcagctgtccgtccagtcctctgacccaaagtcattgttaggactggagcctcatggggctgtgagcaccttgcagactctggcctggtgtgaatgcctcctgggggctgcagcttctcatctcattctcactggctgccgctgcctcgggcttgagcctggatgtggaggacccagtcttcttggcgttgccctgccaccactttctgaccctggggaatcattggccctctctgggccttagcttctccatctattcagagaggatgtttctgaaagaactattgggagactcagtgggcatatagtaggtgcatataggtatttacagatattcctggaaaaggcttcggaaagtattttggttgccaagattgccattgctcctgttcatcattgctggctaccctagctttcagtcagggtatcagatggagttaggggttttttagagtgacttttctatttctatgagagagcctggagggtgaatattatccacacaaagggcatattgttaaagccaaaactggtttcttccttgggtgtgatttcaccaaagaatttgttcagcagaggtttgttagggagcccttccatggagaccaggcccctctgtccagggaagaagtcctgcccccagcccctcagcagcaggctcccctgacttcactcccttgatctgccctttaatgcctaaaagagtttttccaaaagatcttgtgggcaccaggcactatcctacctcccattatctcttagccctagagtgtggctaggcatagcagaactgtagtctttgccttagaatgggagaggcaggagagaagaaaggagacatgagaattgctgtgaggtgtgtgtgaggggacagtcagtttcaggggacatgttctttctggtgcctgcccttcacctcaccatgggaaccggcagggatgactgtctcttgagcagcctgtgtccaggatatgcacacgtgccctcttttataaactcagttacacaccaaggaggggtggctgtgtgtgtgtgtgtgtccagaacgtatcagttcacaccggtatgccttacctgggggcaggatgaggagggaccccctcccccagaatgttgaggaacctgaagactgcacctcaaagcatctagcaagtcttgcccttttattcctgaggagtgagagcctttttatttgagcaggccttctccttgctgcccagtttgtttatttgagcaggccttctccttgctgcgagtttggagtagagcctcttaggggcgtctggtctgcacacccatgatttctccccacctgtcactgtgggagagctttctttagccctcacatccacgaaaaacgaggttcatcgtcatgatgctttggattatgtaacatagaagtctcacttttataacatgcaaagagccttcttctaattttactcagaatgccctgtgcagtgggcaggttgaggctcattctcccattttagcagatgggaaacggttctaggcagtagcctactctgagttgagtgtaaagtcaggcctaagactccatggaggctcccaacttctgagggccttttgaagttaaaagtacagctttctgttattccccttaaactgactgactcttcattccctcaacaggactagtggtggtgaatcattacctagcatttcagttttttgcagaagaatattatcccttctcagaggtaagaagtgtccagcacattcagctgttaacagggacagggtagtaaaagggaacttgcatggtttactttataaacttagctatgatttgaaactgaatctgttcaaggattacatgtttgaaaaaaacaaaacatagatggtttgagaaagctgtgtggatggggacagactgtgctcatttggccgaggtggggaggacactgctcttcctcagtgagtcctttgggtccccctcgaggggtcatcctgaggtcaggaaggggtactagggtgaccttctctgacacagtcctcacagggcagggatggactgcacccctgagccccagcttttcccagtggccgccaaggttttcttctcccacgatttctccacaccctgctgctccagtttgaacctctgggaagagcaaggtcacttctttggggggtgtgggtcagtcagtcatggcttagcactttgtctgcctccttcagtccaggggagttgcttgtcctagcgaccaagatatggggtttgtggccacattcagtcattttcagcctccacctttccccacagaaggatttccatgtctgagggtggcgttccctgcttcccaggcctgggccccctttggagatcaggtgtggccccctgtgcactcttgaccaacacgcagtcaccacacccagcccactcttggcacctccggggcaccctcttctcagtctctcttgttgccaggtcctggcctatttcactttctgcctgtggataattccgtttgcgttttttgtgtcactttcggccggggagaacgtcctgccctctaccatgcagccaggaggtgagaagggatttgtaaggggcccaggtgggggcaagccagcaaggcctgggttggcaggggtccactgagggaacctgaatctagccctgtgttggagacacctggactcggggttgggagggccgtgttcacacacatgcgcacacacacacacacactctctctctctctcatattcttgcctgtatctccacagatgatgtcgtctccaattatttcaccaaaggcaagcggggcaaacgcttagggatcctggttgtcttctccttcatcaaagaggccattctacccagtcgtcagaagatatactgacccccatgcaggcaggatgtggggggcaagatcaggagagtcaggcccctgggcctctatgccaggtggggaccagaagtcgggaaggcacctaccacctgccctggctttcttcccctcaactctggagccccatccccaccctccttggggggctcagcttggctcagatctgatgcttcaagaggctgtaacctcagagggcaccaaggagggtggcagagcctgcttagccaggaggccgaggtccctcagtcctcccctgtcccttccaaggtgggtcaggaggttctggccccgctggggcaggcagggcagggtctgtgaagcttaagagcagatggtgacaagttctctgggcaggtggccatggggaggggccatggcttggcatgtccaacagaaatagtttttgctgttgaacggtgatttctgtccaagtgcagatttccgtttgaataaagcttcgcttctaggtggcactgtttgccttaataccctgacagttcatcttcctttcttcctgctaaccttctgctctggactggactcacttttctgctccagggactccttttctgggtttgggtcttgcccttcccaagggactgttcttgtggcccttaatgggaagggggcaggggtgaggagctgagcctgctcaaggagtgggaagtggggctataggcagcctctctgatgcactctcttccatctctttccccaaggctccgtgactgtcaaactgggagtaggagaggggacaatttaggactgggctagattttcagaagaacatctacaatatcctatttataaatcttcctctgggaaaaggagtggtttctggctgaatactatcttaggctcaaggagaaacaaaataaaaattagcttccaggcagcctgtttttaaagaaatgggactaatgggagaagctgtttgtcactctaagagcatccaagccctggcccgtctgtgcactcttggctcctggggagatatatctgccttctaagaaggcaggccaggtcttgggcacagacctgcatttgttgaccttgcactccaactatagtgccttgcaagtgctcaacagtacatattggaatgaagtccctatgagagccatttctggccatgttctatacctcaaagtgaggctggcaggtacagagatgaactgtacacatgtgatacatttaagccactggaaaaacccctgtgcttgaaaatatttcctctatatcatgcctggagttccatcatagcccttcatttccttggctttagcatttaccttctcttaagaataccagctttcccctttccctgagaggaagagcacatgttggtctcctcttagtgtgaacgagattgccaggcccttttctcctatgcacaccaggatagacaaggcaggggatactggcagcctgcatcatcctcccattgggctgacagctggccctactttcctccctctgctgcttggtccctcaccttgatgatgtggcttcgccccctccactctactgccagtgttctcccagggcttgctaaatccagcagacccctttcctgtcttactagatctgggcagcatttgacatggctgatcaccccttgcttcttggatggcacttccctggcacctctgtggctagttgtcctacctccctggctgttcctttcaggcttccgtgcaggcttctccacttgcccatgcacagtagggtctttcagggttctgctgtgggctccctagggaagcccatccatctggatggtttcaaggatggtgaggaatttagagttgacctccagccccaacatccttcctgatcacctgaaccacagttttgctgccctctaggtgcacagacaattcaggtccatggcccagatggtacttgctgtcttctgcaaacctgccccttctgggtacttcccttgaccccgagatcactcaggagccagacaggaaacttattctattcctgttttctctttctgcccaccacatccaatctctcaaaacggtcaggtctaccttaacatctcttgatttgagccactcccactgtcatcagctttcacctggattatcgtgacagcctcctactgcttctctatcatgtggccagagctatcttcctaaaatgcattgcatagttgatcaagtcactctctggcctaaaaccttccttggctccctgctgccctcaggataaagtctggacccctcagcatggcttgtgagactcatggtgtccttgtccctgctcacctctctggtctcatcacttgccttcttgcattctgggtcccagcctcctgtatccagagatgcagtggctctccattgccactctgattcctcctttcttttggtcacagagaaagggtactttctctgtcaaatctcaacttagacttgacttcctccaaggagctttggctatactctctcctcccgacccccaccctggcatactacacagatcactctgggctcacttgcctgcctaatggtcatctccccagtagactgtaagctccttgagggcaaggattgtgttggaatttttgtattaacagtgcctggcttggtgcctggcacctagaaagcactcaataaatgtttgtttaatgaatg

SEQ ID NO: 962 - DNA, 854 bp, Homo sapiens
tagcagggaagcccatgccagggggacatattagttgccctccaccccattctgggtctcagcttagagcctgcagcaggaagggcttaatctgaacaagaaacagaatttcccagtgggtccttccatcctggaagcctgggcccttagggctgggagggcagtgggggtgccaaaatgtgacaacttttacaatgccaaggtgaagaatagtgtctgaccccccactctcaacctaacttggatttcctggcggcggtgggggggtgccaagagatttatttgcagagaaaagggaggcctggggtctgggcttttgattgggaagggtgactcctcgagcttgggagtgggaagcccataggcacccctccccctttcctcgccacccacaacgtgaattgccacacttcagccttcactgggctgcctcagggggagaggtagccataataactttatgggttggtttgtggggagggcagggtggggagtccttgatgagatcgcacagctgccaggaaggcttcatcgaatgtgtcacgcaggttcatggccagagtgtcggtccagaaggtgttgtcacccaggtgccgcttcctgggcacttccctcatgctgatggggtaaaagccctggggcaccttcattctgtatggccatacacgtgggtacagcatgcgcagcagcacctcaaaaggcagccgcggcacgggcgccacccagtggccgtccactgtgtgcagccgcgcaccgccgtgcccatcaggcctcacctccaggaagctgctgaagtcgtgctccggagtggggtctggatgcacgcccaggcggatgccctgcgagtggctgat

SEQ ID NO: 963 - DNA, 397 bp, Homo sapiens
tcttgttctacatactttattttgcatgcctgtctccgccactagatgggagacttgttgacaaggactaaccggttccaggtgcccctcaggaaccctcccagaggtgtagtaaatgcatccagcgcctagcggacgccctgcgtgcccggcaaggggtgaggtgcaggcgatacaaaggtgcagaatgtaccccaaaagaacagcctagaggggaattaggccggaggatgaccgattaaaatcaccccaactcctgattgtgccgcttcctaggtgcatgacccagggcaacttcctttggccccggcttccccgtctataaaatgatttacattatctgctcaaatttccgacaagaacacacctcgcctttatcacagagcgtggcacatat

SEQ ID NO: 964 - DNA, 58181 bp, Homo sapiens
agtttgctggaacattatcagatggcttagggaagacgatggacaatcggcatcagtcagagcgggagtacatcaggtaccatgcagccacaagtggtgaacaccttgtagccggcatccatggcctggctcatggtaagtcatgggtgacatcaggctctgctgctgctggtcctcagaggcgcctttgtatcaatctgattgcagctataaaaaaagaaaggtgggctgggcgcggtggctcatgcttgtaatcccagcattttgggaggcctaggagagtggatcatgaggtcaggagtttgagaccagcctggccaacacagtgaaaccccgcctctactaagaatacaaaaattaggccaggcacagtggctcaatcctgtaatcccagcattttgggaggtcgaggcgggtggatcatttgaggtcaggagtttgagaccagtctggccaacatggtggaaccccatctctatcaaaaatacgaaaattagacaggcgtggtggtacatgcctgtagtcccagctactcgggaggctgaggcaggagaattgctcgaaccctggaggcagaggttgcaatgagctgagatcgtgccactgcactccagcctggcaacagagcaagactccaattcaaaaaaaaaaaaaaaaaaaaaaagaaaaggctgacaacagaggaaatcctgtgttggcgtacctgatagccttccaagctctcttactttatcctccttgcagttgaaatacgacagccggtgagaactcctcattcgctttctgaatgttgtgcacattgcaattccttttcgttctctggcttctgttcccaaagtatcataaggtgtaatcaaccagacctgttcttagaattgtagctgctacttctcttagaattgtaacctctgccttctccttactgatcattccttccaaagaaattgaaatgaggaatttgtggccaggtttgtagcccaggtgttttttagttttacataaatgtgcattcactaaaattataaatttatttgcctaagagatgttggtgatggcatgaatgcatttggtctctgactttgaattcttttaatgctttaattctgagtcatttgccttttgttgcatttttcttaacaatttcttagtacggcatccaaggcccttggaactataaatccagccaattttccaaccaccatccttcagccatgctgcactttggccacacacagctatgtactgcttcccaggtgtgcttccaagtccttgctcacacatggtccttctgctctccctcctctgcctcatttccttgtctatcaaaatcctactcagcctgtaagtcccaactcaatacattttcccagctctattgtccctgttagagttaatgacagagcacagtctgggttgtgtatgtcaccagctgtgtacatctgatagattgagaatgtgaggaggggagaaggaccactttgcattcacctttctccttgtgtacctcacatgacacctggcacatagctcatgcatagtaaggcttagtaaattaaactctttgtaccagatccttaggaaccatccaaagctatcagagtcatatcaagactgatcagtattaattatctgcatttggaagaagaggaaggaatatagacagtaaaatattatatttctatttgtgcttaggacacgtttagaatagagtttttgtttatcagctttcctaatggtgagatttggatcaaaatgcctttgcttttcctaaggctgcccaaccgtaaagggagctgtccctaaggagacgtcaggccagaagtgaaatttggctgaaagtaatttgtttatggattttaaaagttgactgttgggcaatcatttggggttaaggtttaatcattctttctcgtaatggtaatgacagtacattggactcttagaagacttttaaaatgaatataaaatgctttgttatgtgtggtggcctttatctggccagcatccttgtgacgtggagagagcatggctctcctcactttctggatgaacacacaaatgtgctgagaaaatgcatgattggttcaaagttgcaaaatcacctcccatcaagaatcattcctataatatgtacagcctctccaggagccaatggcttcatccaaagaggatccactgagctctgggttatacgaaggcagtatcctagagtgagagtcttcccttaggatgaaaagacctttagaaggtgataagaaccagaatccactcaatccccttgatgtaagaaatgggaattgtgctcagttctctctgcaggccttgctggacccaggttcagtcatgttctgtctctcaggtcccagtctgaattcctgttctgtgtgtgctctgccaaaaactttgttcaaaagtttgggaaagggctgggtgcagtggctcaggacagtaagcccagcactttggaagacctagagggagaatcgcttgagcccaggagtttaaggctgcagcaagcggtaatcatgccactgcactcctgcctgggtgatagacggacaccctgtttctaaaaaaaaaaaaagtttgggaaagagatattgcctcactggagcaaatttacccagaatccaaaagaaatgttgtgaattgttagtacattctcacccaaggagtttcctttaccaatttgtctcactagagctgaagagtctagagagcttcctcacaccccactgtcagagggtaaacatcctgtgagtgtccctggcacaggtcctggagatgctccctagacgggctgcctcttcccttcagtgactgtgacctcttcagcctctgccagcttctggcctcttctaaggtgttttcagccattgctgtcaacttgcaaaatgtttggaatgcctttttgacctggattggtcttttgaactgactccattgagggtcccagccagctttcacagctttttggggtgctcttcatgaaggttttatataatcgccgataccgaatttcatcaaagcatgcagtagcttttaccttatttcaagcatccagtggggttggccagtcacccccatagtgttctttgaaaattgcaaatgtataccatcagctctccatatccacagattcagccaaccatggatggaaaatatttggggggaaaaaagatttcacgaagtgccagaaagcaaaatttgaatttgccacacgtttcaaatactgtattgactccacacaaatgaagtgatatgtgggcatcgtattagctacaataaataatctagaggtgatttaacgtatacaggacggtgtgtgtaggttatatgcaaacacctacagcacattatgtaagggacttgagcatcctaggattttggtatctgcaggggatcctggatcaatcccacatggatactaaggaacaactacatttagttatctctctctgccttagatatctttcttttcttttctttttttttttttttttgagacagtctcgctcggtcgccagactggagtgcaatgctgcgatctcggctcactgcaacctctgcctcctgggttcaagcaattctcctgccttagcctcccgagtagctgggactacaggcacgcatcaccacgcccagctaatttttgtatttttagtaaagatggggtttcaccatgttggccaggatggtctcgatctcttgacctcgtgatctgcccgccgcagcctcccaaagtgctgggattatgggcgtgagccactgcgcccagcctctgccttatatttcataggatgccatcatcttcaaactttccccgaaggcccaattttctagtctcctgttgatttaatcctctatctgtatcctctcctgatcgtccgtaggctgcccaagctctgggatcgaaaaattggccactgttaacctctcagcttttctctgatttttttttttttttttttttgaactggagcacactttacttctgactaacatgtaacatatatcctctgactctggacttaatgggcaaatctgcaggatcctcttctgtgagttggcctgtctgtggcctctctggcacagagattaatagaatggccttaagttatcattccataatcaaggggtttggctttaaatgcttttgcttttgtcctcgtcaggttacaacagcccttgtctttttcactaggtatcattggtggactgaccagtgttataacttcgacagtggaaggtgtgaaaacagaagggggtgtcagcggtttcatatctggccttggaaaagggcttgttggcactgtaaccaagccagtggcaggcgccctggattttgcatcagaaacagcccaggcggtgagagacacagccacactcagcggccccaggtcagtggtgtgggaagaatggcttttgcagtttccagcctaggtctgctgcttctcctaatccatactgatgtgtttaattgtgcactttcttagttatagggtttttaattcaaatacttgtaactgaaatttctgatctgcctaatataaaaagatgaaaatgaggtacagaaacctggcatgaattttttcagataaatatatatatagcatattttatatatgctatatattttatatatgtatgtatatatagcatattatatataagtatgtataactatattatgttatttttctccattagagaggtcagaattaggattaaactgttagaagcttcttctgttcaccaagccaactggatccccacatgcctatgaagaaaactgtcagattgtagtctggttcttactcctacaccccgtgatatagttctagaatccccactgttgttgttcaccatgtgggtctgttccttcttaattttccttccgcttgaaagtatcagccccaaccccataaagaaaagtgccaccccccatccccccagcaggtcagcagttctgctgtgggattgctgtctggccttgataccagctgagactggaaatcagggacagcccatatggttccaaaccccacagaacccaactgctttaacgtagctgtttgcttgaatggcctattttagcctcccttttccagagtgactaattggggattcttatcaacaaagggtataatgaatgttaagggcccagccaagctagactcgacttaagcccagaaggattttgctgctgcttggataatagattttccctgagtgaattagtacgcccttttagaatgcctagggcctggcccacatccacaccctatcactccctcaaataggatgtgaagtgaaattgtccccaattgaagtgaatccatttgtctgtcaccaggaaaacttactgaagacacattactgcagtaggggaaatgctccgattgtggactggggccatgcagtgtgctgtgccagaatgccttccatctggaagcagctgagtaaactctgtatggtttactttagttaagttacattctattctcagatacaaaactaaaacaatccttgagtatattttgaagcatttatgaagttgtggggaggggcaggcagtgaggaggcttcgaaagtatttccagttagtttttccatctctgctcgaagcccaagaagtccacctccagtatttgttaagataataagacttaatgaagtgtaaagctgaagacgcctaagagttcccaaagaagcatgtgtattcttaaaatgtcaaaatagccaagggattggttgattaaaaagggttcaaggtatatgtgataaattttttaaagatgattttgtgctgtgaagttttaataatgttgacgagaaagaaacggcttgaattttatacattgtcagcttgcaagtcttcatgggggtttttcattctttttaggagcacaagtaatgtagccacagtcactgcagaaagaatgtctttgagagggacattcttgtcatttttattagttgttcaacattgccacagaagtttgattttctgtcagccagtacatagctgccatttattcattgcctgtcagtaaatagtgattgaaaatttcctatgaactcagggttgggaatagcagaaaccaaaactgtctctggtctcaaagagcttataatcaagcagggcagcaaacataaaaaattatataaacacttatttgctgaaattgtgacaaatgacatcgaggacacttagagggtgccgtgagactatgatcagagaaggtgatggggagaaggagggtggctaacctagtgatcaggggagttgagacaggcttttctaggaaagtaatctttgaggtgaagcctggagtatgaagtaggagttggccaggtgaagagaagagagaatcaccttccaggtaaaagggaactactgtgtgtgcaacagcaaaaggaaggaacttatctatgtgccaggcattgtctttgtgcctccacgtgtggaatcccatttaatcttcatagttgatttacaaatgaggacaagacagtccagagaagtcatggagcttgtccacagccacacagctggtgggaaatggtagacctagacttagacccagcctatgtcttgaccctgtgcccagcaccactgcattgcaccctgctgcctgggtctgcgaggagggggctcattggatttctcttgtacgtgtttcagagtcagttagtgtcaagatatggcattccacatagtttcttccctgctgactcaagatttactttactattacctgcacactgacatgattcaggtcttgaccaacactgcatttttgtctgtctgtttcctctggcctgccaccttagccttatctggacctcagcagcagagaccatgccctcatgaaggcactggggagccgttcacagtcagcactggccactcctcatctcagcccaatgaagttttacatttccatgtagatgaggcactcgggatatagaaaagttgtgcagcttgactcaaagcagacagtaattgggtagcctaattgaagtttaactgcaagttccaactttgtaggctgcagaaaaaaaggaaaaaaaaaaacaacaacaacaaagtttaactgcaagtttcatgagacagcgatctgcctaaccattcactcctcctagaagcaaaagctaccgtgatcattgaggcacagccggtcttcatatatcctcaaaggagggggattagcttccacatcccttctctattcctggaggtgccagtagtgggagagtcatggcagaagttaccagaggcaagtggggcagaggcaagtagggtatatgtttggatcagtggatcagtgtcctttattgtgcagaaaaagctaaaattacagattcttctgaagggatacatagcagccgtttcaccaatgtccctcagtccatttgtccaggtccagaagtattcatgaggagctatgcgttagaagagagcacttgggctgggcatggtggctcacacctgtaatccagcattttgggaggccaaggtgggaggattgcttgagcccaggagtttgagaccagcctgggcaacacaatgcccccatctcttacaaaaaaaaaaacaaacctggatatggtggcgggtggtgtgcacctctggtccttgctacttgggaggctgaggtgggaagattgctgaagcctggaaggttgaggctgcagtgagctatgattgtgcccctgcactccagcctgggcaacagtgagaccctgtcaaacaaggaaagagaacacttgatctggaaaacaacaggccagagtcccagccaccttacttattagctttgggccctgggtcaagtcaagacatctatgtaagactcagttttagttttttcatctataaagtggggataaatttatctctctgtttattctgcttctcaggggtttgaagcccaaccagagttattttaatgtggaagctataaagaactataaaaatgctgggtgatattattttaaagtcctattaaaggagcgcagagatccttgcaggtggagaaatgtttcagtgccagtttgttctgatgacactgtatctcttaggaacatactggctctaacactatcaccgagggataaatcaccctggtttcttggaagtgagttataaccatctccaaccatcccggttgattgaacaggatccaggggtgttactcagggtttttccccactgtttagacaacagggactaacaaatgatttgaagggattagaagtgagattctgaccgagggttgacctgagcccagggaccaagccaggaatagaacccaagagtccaagagttctgcctctgagcctgcaattggaatgagactttctgcttcctttgtaatatttcatccaagtaaaggcttagatcttagcatctatgttttaaaagacccaaattttaagcagatgataggaaagtaagccataaaactgtgaaagagtactccttccagtaatccatctgaaaagtggccttacaggaaacattggctcttttttgtgtttatttgaacatgattttatttatagggaaccccccctccttatgttcttttagattaaaatacttccaagttcctctccttgttggagtgcgctggcattccaagcgacagccacctaactttcctctgaaatttccaggcaacccaatagttctcaggaaggcaggtgggggtggggagagaagagggcggaggactgcagagcctttggcctcaacatgagtgttgtggaccaatatcccccactgcatttgttcactgtacaagtatgtgtggtttggaactgaaataagaaaccttttccaaggcaacgttctgctggctcaggttgcatcttctggcctacgtgtattgggccacactttgtctgttcccaagtaaagtttatgaaaatggcacagatgcagccacacttgaggtgccactgaagctatgtgaagagcctgctacccttcaaacagaccaggcccaagcaaggtgccaagccatgtgagagtgcccagtccactgtgtaaatgtgacggcctttgatggtagtgtttgaaaagatacttagtagaaagttgcagagacccgggagcagccatttcacaaaagaaggcaaaaatacctttgagaagaaaggaatgtctgcctctgcactatgtatttgcttgtttgtttctccaaataccatctgttgcagactggggtgcatgacattttaggtaagtagcagatgaagatttatgaagctgggccctgaggtttcctctaaaatatttcttcaccttttaagtcaagacccaaaagtggggagagaagtaggagttggcagaacttgaaatatttaaactaatttagcaaagctcaggagtgttggagcttatctcgttatttaagttagataaggaggaaggggaatttgaaggataatgatagatcagtgtttaagaatacagccatcaggactgataatgttctggaatcccgggaccctcggattgtgcacgtagatgtaaattccatttgctctgagaacttttgaaaaagaaagtttttggttgatttcacagaaaagatttatggtgggcatatttgactttttcagtaaaaatagccccaaaacaccacccaaaatctgttaagacacttctcgtgaatgacctcttagatgtgaaatggaaatgggttttcttaaggaaaggccccttttgttaacaatgtttgcatgttacttatgactctccaggataaaaggactaagactcttttgggtcaccagagcctgaatgcagtcaggttggacaggtcagcaaaaagtctgcaaagaggccgggtgtggtggctcacgcctgtaatcccagcactttgggaggccgaggtgggcggatcacgaggtcaagagatcgagaccattctggccaacatgtcgaaaccctgtctctactaaaagtacaaaaattagctgggcgtggtggtgcgcgcctgtactcccagctacttgggaggctgaggcaggagaattgcttgaacccgggaggcggaggttgcagtgagccgagattgcgccactgcactccagcctggcgacagagcgagactccatctaaaaaaaaaaaaaaaatagtctgcaaagagaacttaggaaatgcttccattaactttttcatcctagctgggtaatactgcttttaattactctgctctgagagcagccatttcttatacttggtattacacataggacatcaaacagaattggcttgaattgagcctttagggaacttccaaaggtaaagattgagtaaagattcaaatgtttattaggatataccagtgttcatttttttcccactaatattccattcaaggcaggagactaggctgatatcccatgtatctagagtggatcaagtccaatatttctttcagagttcctgttccttaaaactgtaaatgggttttatattttattccatgtttggcttaataagaaaatatttttaattgctacctggtaaaattaacatttcagaaagatctgatatgttatcctgtggctcctgcctcatacttatctaggaagttccagcacgctccttccagatgagtccggtacgctgtagtagcatccatatagaggcatgtatatggtagaggtgaaaagctggaacttgtacctgtttgaccctaaggctctggttctaatctttgggcatatctgtcttttggcttggtgtaacatctgctgcttgggacagccattgtgttagttaacatgtcagtttcatcacgaaaaaggcattacatttcagtgaaactgaaaaattattgctatatccagctgaagggaagggactgtcaaatatctcctctgttgtccaaacatggcacagtagatatagtgacagtccctttatcttctactcacccttgcgtatatatttgtgaggtgagagccatatattctcacttcctgatcttgccaaaccaggtccttccagagaatgcttgaaggtagatgggtcattttctcattcctccctctacgtgagcaaccccagaagaacactaagacctgtgttgatgacattggatgtctcacttggctctgaaattaagctgatgaaattataggatcggatattttattttattttttttcaagacagagtcttgctctgtcgcccaggctggaatgcagtggcacaacctcggctcactgcatcctccacctcccgggttcaagcagttctcctgcctcagcctccaaagtagctgggatggcaggcgcacgccacctcgcccagctaattcttatatttttagtagagatggggtttcaccatgttggccaggccggtctcgaactcctgacctcatgatctgccgaccttggcctttcaaagtgttgggattacaggcgtgagccaccacacccagtcaggatcagatattttaaagaagcatcttaacagtccttcatgccttataagttaaaattcctctcacaggaacgtaagcagagaaatcttattttctgagacaggcttcttccctctcgctgaactctaaatactgtattcccctttcactcaaaggccccagacgatgccattctcattataacataacttatggaaagctcagatctattgttggaaaaaatgcaaagtgtgtgtgttcatgcacacacgtgtttgagaaaagcctttccatttctgaaatcccaagagtcatttttatgcaagattatctgttaggaaaaaacccacttttttggtcatggtacattataatcatttctagaaaggagagcgtctaatttttgccatttttggcatgcagagatgactgacttcatagaaaccacactatcctgcttccaaaagaaaaaaaaaaaacctactgaatttacatctgaatcaacatctcttcaaagtccagtccttgcatctcaaccagcaggtccttgtgcaaagaaaatgaatgggaagtgtgatttggggttattccatttactttctgatttggggttattccatttaaaaatgaaataatgttgccattatacatctgtagtcccttctgtgttcagtgaatttgtttttaaaactctaacgtgacacctaatattacatacataagataagacatttgagatttttggtttgaacttcaagaaaaaataaaacggtgtctatttctttttgagaaaaaatttgtattttgtgcattagagaaggttgaagagccatttgttatttgtggaactcctctgtaaaggcattggatttacttatttttagattttcatgactatcccatgcctcatgtttttcccttacagaatcatccacctttgcccaagataaaattgaaatctttaacaagaggacccaggtttgagttcagctcccctgctcccagagagctttagactgtaagataattctgagatacacacaggacatttggactagcagggacttaaagactcactgttgtattacagattatggctcggaagcactgagggaaggaaagataggtgtgggtgttataattcacccgtggttttcttgccctgatgtatttatctggtactcttttgccagtctccttctcaaagacattttcttgctaaatttcttactaacttgtcaaatggagggaaaataagattgaattagtaaaacattcttatcacaatatactctaaaagaggctgggcgcggtggctcacgcctgtaatcccaacactttgggaggctggggcgggtagatcatttgagctcacaagctcgagaccagcctgggcaacatagtgaaaccctgtctctataaaaatatacaaaaattacccgggtatggtggcacgcgcctgtggtcccagctactccagaggttgaggcaagaaaatcgcttgagcccaggaggtcaaggctgcagtgagctgagattgcaccactgcactccagcctgggtgatgggagtgaaaccctgtctcaaagaaaaaaaaaaaaacaaaaaacttttgttatattgggcttatataattcaaattaataatgttacttatctatatccttagtggatttactttaatacattgaggaaaccgctttctgattagcagagagaatttgtacatatgggttcttttagaacagagggtctcaaaatacggtctagggaccccctgcggaaccccagatccataacctaaaacctatttgtatatattcatgtacttatatatgaatttatagatataacaatttttataatagtattctctaatgagtatacagtggagttttccagaagctacacaatgtatgatattgtaacagattgactgtagaagcagataggtgaatacagctgttttccagttagcaagacttaagagatttacaaaaatgtgcaggtgccactctcctcaccttctgtgactctgcatacatgccaccagccaacaaacgtacctggttaatttttttgacaagctgctctagttgaaaatacagtgattgataatccatcatcttgctgataagtagcacatatcggcaatgatgggctaattcggactaaaccgtaggagccgctgtaatgcaatgcttccctttggcttcctgccaacagttgtcagccctcctggtttgctcctgacttttactgggtttctagaagtaacaattggaaatattttatcacatatcagaaagacctcttacaataatttacctaatttagttcttcaccttaacctaccatcccaataaattttaatttcggcagggtagtaagtgtagagcagattacttcaaagtgcagaatcttgtccaaaggctgcttggttgtgtttgcactgccctgactcttgcaggtactcgagaaggtgtatctgtttcagaattcacttgccaaaacctcaactttctcccctagcaaagttgctggagtaggataaacccacagtatttggataagctcctttgaactccttgtagaaagcagtttttatgaggcagttgttctgtgttaacaccagagacaattcctagcagatttccccaaacatacttcaaacatcgataatggcaggggtgacccaaactgtatcataaaatcccagggactgcaggagacttcaaaggggagacagagcaaaacctcacttctcgttatgaggagtatgggtcacaggaatcctggctagaatccatggtaacctcgcggagtaatgccaggatggacagaggccagggctcatcagttccctagactttactaattgaccccagcagcacagttagagtggtaataactggcacctgcccacctcctgaggtgttagaggccaaattaccacatgtgaagtgcttttctatcctttagtgagaagatgcaaaccttgaagtgtgtttctatttttgtttgaactatcgagggcccagttaattcagttgagccaattctgaccttgggatattcagatccatcacttagtatgtacaggcaaattgacagtagaaatttattgagtcttgaactcctactatatttcaggcatttaataagtattaaatactgggaatatttaaataattgaggacaaactgctctgaagaatcaccaagctgtttggtttgtgtgttaatattcttaagccactcttacgtgttcattaaagcaagtttccctatagttttcttgaagaactcattttttagtgatttgacttactctttattcttgaaaacaacaaaattgcatttgtgcatatggtatgtgttgaggggggtaattacaggcattttttccctcattaccgggtccgttacagctccttgaaaacaaatagttatagttttactaattgtttataaaattagctaatgatcctttgattttttagtttttttataccttagctgtatttaataaatatttagtatcttctgtgcaattaataagaacaatgggggccaggcatggtggctcaagcctgtaatcccaggactttgggaggctgaagtgggcagatcacctgaggccagagttcaagactagcctggccaacatgatgaaatcctgtctccactaaaaatacagaaatcagctgggcatagtggcacacgcctgtagtcccagctactcaggaggctgagacatgagaatcgcttgaacctaggaggcagaggttgcagtgagccgaaatcatgccactgcactccagcctgggtgacagagtaagactctgtctcaaaaaaagaagaagaacagtgtttaaaaacctgttatttttacctgaattattttgctacgacaaatttatctttcaaattagattttatcaaagtagatatgtattcacttttttaagttgaagtctttctaaatgtctaaaaccaaaacacagtaatctcctgccctacctttccctgattcctgctccctcagaggcaatcactttcaacactttgggctgtttcttcaatgtggaggtatttacctttatatttcataaataaaccaactgctatttcttgacatcatttgacttcatgttgttatacatacatgtttcctttccccatttttcagtacagttatatgatcctttttgaataacttagtattccatttttacgttattatgactgtgtaaatagtattcccagtgaagccccccacccaggtcactttgatgatgtttcctttttaaatgttgtgctttgtttttttctccttggagttagtaactgctctttcagtattgtctgctttgttttctatatgcacattcgtaatttattctcaaatgcttatttagtttccacatttttttaaccctgggcctagtaactcgtttttctttaaaaaagaaaaaaaaaattttatgttcctattgctaatttatccacaaacactcttctgtatgtgtacaaatgcactgagtaatttattggtttctaattaaattctccctcttgatgtcctctgctcccatctgactggttgttgtctagctatttttgtctctaagctatttttctatagtagtactatagcagtactattctgagtttctttcttccatttatttgttttggtctttttctttcatgaatagagacagtccccagagaatctggtgattcttgactatctgttctactcctctttaaagatgaggcactaaaaagccaattgggagctcttggtttgaggctgagggggccttactgtggaatgatcaagtggggacctgctgactctgggctcctgttgagaggagcaaaactgaatggggatgagagaggggacctgaagctctaactgcttcccatgcagccttttaaccaatcttcctgttttcacctcactccaggcctatctgtttctcctttatgctccaggccttcagagctacttgctgcctccatctttctgaaatgcagtggaggccaccatcctaattagctttctgctttgtggcttccactccctcaaggcttacatttcagcgccacgtgtccatctgcttttcagcttctaaaatattgttgacaccttctctttatccttttggatttgtgccatttgtatccctttgctttccctttagaggggtctctggactagatctgtcatgtttaatcagaagtcctataatttagacttttcactaatttgtgtttcctttcttggtgttctttcccctttacccccaactagtggctctgaattagtgtggttttatgaaacccatatccattcagccatggttctatgtattatctcatttaggcatcacagcagcttttgcacagcatctgctcaggcagtctgtggctcttctttccccgaaagattgagaatacatctggtgagaagccgttgccagtcccagcccctgctttgagtctggtattggtctttaatctctcattctgtgtgttgtaaagaaacaggttgtggaaggctcttgtcagatcccaggaacatgaaagaaatagcacaccctacggtagtgacatggccctgtcaccacccctcattgaaccataaaagctattcagaggggccagcagctggggagcgactgtacttagatcctgggtgctgatgggtgttttgtagtttccaagggaagttgctgaaagttttcttatcttgacactccaagggcaagaggtctttcttcaaagagaagcgcttgtttcagaaaaagatgtggaaaggacgtaaaatcacaggttcttccccagttctgaaaaagaaataggaaggggcaacgtggcagtcagtgtgaaaagaaaccacgcatttgcaggaagcaagaaggggttccgcagcactggctgcttccggcatctgcagtgcgagggtaaacaggcctactggggagtcggttggccctgggtttgagtcattgggctgctgcttggctgtgacctggaacaagtttttcccctcttaatctctctgagatgagattcctttgagtcatatgcctacctcggtgggtggttacgtggattaaattatatcatgtatataaagcactcagcctggcatgtggcatgcaggtagggctcaagaaatggtgtcagtgtgaatattctcccctgaatgttggaatgttgtgtgaaggtgaaacagggattgtgtccctagctcttacttaaattcaaccctgtccccgaattcttgctgaccacctgctagagtgtgaggactaggagttcatgtgcttggctgggcttttgtccttcccattctctttcttcacacaaaatgaacagttgaactcaggccaccaaacctggttgagttgctgggtggagggactctcctgggctctgagcctttgtgtgtgggaaccgcactggaaaaggtgtgcagaggccacgaacttgctctgaacccacttgtgaagagcaggtgaccccaaactattgttagtgtctgctgtaaatgatatgcctctgggttcgagcagagttcagccaaaagccccacatgacatggaaatctgtcctggagccaggtttgtcgggtaaaagttatgtagcaaatgtctccaaacattggcatctgttgtctgccgagactaggacaaccgagaatgatggagtgcttaaggaaattaggatggggcatgcgaccctgtaacagctgataaactgtttcaggccaccgtggctcatccagctcttttgataaacagctttaaaagcattacgtggtttggaaagcattcttcaaaaatggttatattttccagacgcatgacagtccactgttcagtattatttaagggttttaaattgtagaatcagattccttttcagtggggctcttggaactgtcgagggctgatctgtctgactcccaccaggacaatctcacaacaatattattatgtaggtcggggtcccctaggtctgttaaaaaaaaaaaagttcagggctaagcgtttaagaggaaaaactatttctttcatttctagctaagtctgatgggccctttcaaacactgctttcatcatgcaccttttatttcacgatttctgcataatgaaaatacaagatcgataactgtggattatcgtaatgccttgagcctttgaaaatgaacattttctagattataaatgttccctttgtaattcatttcaaacttcatcctcccatttgtcctaattcccgaaatttaactgttgccttttgagcctcctaggaaattctgggtatcctttaggcaagggaggtagctcttgggggaatagcattcaggccacaggcaattcatttgcgacttgggctcttcttagaacatatgataagtacaacgcactgtagtgacagattttttaaaaaccctattaaagcccaatatactaatgcagattttttttttttaagttttagagagattcatgggattttattctttttcccaaaggcagtggtggagctgacagagtagcatggagcctcgtcctgatgtattgtgcggaagtggcagcagttcacattcattcagtttgtcagcataggatcagttccttcttgactcaactctctgtgatcaaaataagctattggatgttccctttgggtactggaagcagcttggccccttggcaagagaacaggattgcaaatcacaagagcagagccctgactccagctctgatgctactgtgctttgtgaccttgtgcagacagctttatatccccatctcaggtcattctcccccatacaaagggggagagggtcatccttgccctggtcatgtctgcatggctgaggtgaataactagttgtgtaacttcctggaggagtggcacagaggaagctcccttcctagggctggctctgccatcagggaggaagctggatattagaatgaagaaaaagcccatgcagaatatatggcagcccgataatggattctaaaaataaaaaagcactaggttaatctgcagctgtagtgtacctaaagtattctttggcaggttgtggccctagcctaatccccagctggacttagcaccatttaagtgagttacatctcatccccgcaagggattgagtctgtagccaatttggccttgtcaccacttcagccctccctctgatttcacctttgggaaaactacaaagtggccccagacatacatagcaggcttgatcacatgggtggagtctgtcaggacagcatacatcaaataaaatgtccagggaacctgttgtaaataaaccacttcccgcatgctcagtcatcgtggaggtacttgaatgtttagtttcttttagctgatggccaagaaatcaatgtttaaaaaaaaaaaaacaaaaaacaaaaaaacaccttgacagaggcattttgtacaagaatggtgtgtgggtgtgaaaaagtaaattccaaaacatatttccttttagttcccaaacccatattagatgagtacttcttagccttggccacagtgctagagtaaatagcagtgtcacatagctcgtggaacaggcaaaccacagaatgtacaagagagaagcgtgcacaccagtgagtctgctatggcagctctctttgtcctggtttctacatctcatttgtaagcaacttgtgttcctgcattttcagagtttggccagtttatttacttagaattgcatgttcctggaatattgtcataaaagtgatcctgagatagaaaaagtcaacaggaagcaggggcattgagtttataagttctcagtctgtcttggcccatattaaagtctcattctcaggggtaggtccagctttccaaattttaatatatcagagactcctgatgcatctgggctcatgatgggccaaagtaggccttcaggagtcctcgtgttacacactcaacgcctaatggagactggattcatttacgtgtattaatgtaacctgcgtgatcatgtgagtgcaagtgctttgtagattgtcctgggagatgtggcatattatgactaaagacttaattgaaccctgaacatgtatatgaataactggagacagattgactggattacacatttttcttgaaaatttcctaaatttagcctacctctttgttgccttttatttcccagcttaagtggttctctataacactatattttaaacaaaccagaacaaatagtatacaaaagcatagacaagagggatataacaagagatggttttctgtgatccgtggcacctcctctctaccctgcctccaccaccaaaaggggctttaaattaagattcggaatggcaaattcacttaccagctccaaacacagtagacaaggaaaccttgtgaggaaaatccgagagtatatttacagtttctgttcagaaatacatagcttaacttcgaaggaggaagcgtgacttttcacctgcagatagaactagggtctgatttgaaacagaccactggcttcactgaaccccatcaaagaagtctgcttctgcccggaattggaaagtgccagtgggcatgtagttgctagtatgggatttctgtttttatttttaacaagcttgggcccaactcttagtatcaagatgggtgaagacaaaactgaccagaaaaacacgtatcaagtcagcagtggctcacccctcagaggccatttttcccacctgctcctcttatacctttggtttgtttttggttttggattttttctctatgttcctcctactctttctttctctattttgcttgggccttcgttagaagagttctagtaatcatttcagacttccaaaattcaacccagtagcctcattttacaggtggacccactaatacacaacagctcgatgtgacaaaccatagactcacagttaatcacttggagagcctggattcacctccgcgatgacctgcctttccagccctccagtggcgtcctctgtagtgagttgtaaatgtgccactctagaacattccaggaaagccctcctcttgggctaaactctaaaactaaaatgaagtcctgcccatgtgagctgcttgtttaacactttggatgctaatcagagcattaatgagaacacatggatagattcggcaggtctaatgcttgggaccttctcctatttgattccataagactaaatcccctataaacacttccctcctgtgcacacacacatgcattcacatacagcactcacgtatccctcccttatagccaaagaccgaaaaataaattttttttttctacattaaaaataagaccagctagtaaccagggttggcattcccatctcctgtggaacctggaaggactagcagatagctatagagatctgtctcctttttagtgtggttgtattaagggcaatcttgcctcccatggcaccccagaaaatccaggagttcaagtgggggtgcactgtaggaggactcagcagctgttttatggaaggttcgtcagggatcagactgaagattttgcttttgtgagaacaaagtgaaatgtgacattcaggagcagctcggggcctatatataggggcccagggcctgctgggatggggttttacacttgggctgtccttttgcccttcccctgaactcttttcacttcagtcatgagcaaacagtcagtgcctgaactaacaaccctgtagtcctccgaagcacggctggcttacagtaccgaacaaagggagggagtgccgcgtgggccggcccaggccgaggaatgcggcttcagggttctgctccataaatttaaccagcacgacgaaaaggagataatatgagccttcgtgatgatctgaaagggggaggttctgtgtcccattgattgcggtctggcccaatgccaggcccaagcctgaccgacagttgaaccatatcattaaggcgtgtaatacagctcgagtcttgtactgccgccaatgagtgcatatccacagggcaaaagtttataaagagtcgaggctgtcctgtttaaccctctcacactgcatgtaatagaaccagctgccattcagaacttgcccatctgaggtcataaaggaaagcctgcacgtttcttttcttcaaacagcttttcaggactggggagaggaagaaacgctgtctagagagggtcaaggcacggtgatgtttctctctggagaagcaaagcagtctgcctccctccccccggccagaaacgggacaccttagtgctttcttcagagtagctctctgtttgtggtataatgttgctggaggaaacagggctgacaccacaggaaacctgcctgtctccaaggaggccgcatcggtggcagaggtgggtcagatgccggccgtggagtgctcttgtcaagcttgggatgatgccgttttccttccccatcacctcgaaagctgttaatagccttgctttctggccttccacagctacgcccaggtgctaaaacagagcaggtggaaggccgccccacggagtggcctgtgagcccagagttctcactgtccgaggccggtggccccatgggaactctgtccattcaatagggagggcatgtagaaataggcacattgtcacagcaaggcctggagtggcctgggttcttacagtgggcactgcattgaggaaatgggcagacaaacaaggatttagcataagtatagtcagaaagaaagggctgcctgtgttcaaaggacaaaaggaagaaagtgggcgaaggggtagtttagtcctgtccatcagccagtcacgttctttggccaaactcgggacctgcctgtgctttgtccatggtgtccaggaagaaatctgtgtctgtcacttccagattgctgcttgtctgcaatggacaatgcctcttaggcagacacctgctcgggatgacagtgctgcagaaattgatccaaaacattgactagcttgcatggtatcgctgtcattagtattcagtcttcacaaccaccctatgaggtgggtgctatactttccccattgtacagatgggaaagttgaggcacacaggggatacgtaacttgtctaagatctcagaggtagtaaggaagggtaccagaatgtggaccctggccaactgaacacagagtacatgctcctaatctctgtgctgcttctgggccatctctcggtccctcacatcgaaagacctcatgatttcaatccaaagcatctgaccaagtgttaggtctacttcctttcgattcttggatatgaagggtaggagcttaatatctgcctatagcccagaagatttgtgcaaagaccctggttcacttggagaggaggtactataaaatttggaccccacaatgcgaatgaagggtatgtattgaattccctcagcccaccagcttaacacagagacagtgtgagggatatactatagctgggaagcttggaagggctcatgttcaagggcctctttgggccaaacagcagtgggcctgagcatggagagaccctggccttttagtgccagtgcctagagaagcaggtcactaagctttgtgcccaggagctgtgctgtccctggtccatccctgtgtaccccattccactcctgaaataatgaactactgcagccttccaagttcacagtgtgccagtttgtcacagaatagcagtgacacttctctgctgcaacccatctttgctctgccatgctgccaagaccatcttcaccaggcggtaacctgggaactccagctggtacacagtacaagaagcctccgcagtagactgtcccaggtgcatgtgctcagtatgtcatagccatctccttttggaggccagggagagcttctgtttgggtgccacggatcctggacagaagctttctagaggtaggagaagagactaaatggctggccaacccagagattgttggattgtgttatgattccatggtcaaagtgctttaaaaacctagaaattggctctggtagtgagtcccaggatggagctaacttacgatctggactccattacatgattgctaatcctgaagttcagcaaacgttggtactggctgacttttaatggagtacctgtttgagggttctcctcatcatgtatttaaggttaaattgtataaaggaattctgctgctcttttgaaattttctggttctgtttaaccatacctaaaaatgccatgaggtagccagatgattgactaactgggatttatggaaattcttatctgcaaaaatctcaagacaaagagggcactaactagaaggttcccagtgctttatgtaacatgcagaaggaagtctggtctcagcttcttggatctgagcaatcctttggaaagggagcaatgaagagcagtaactgaagactcatttcctgccttctgtgtgactcactctcctttgtcaacttcaagtttgccctaggcctgcttgcttctctccaccccaaggaacttggtctttggaagacacaggcacctgccctctctgtctgccttttgcccccaggtccagagggagaaacaaaccctcagttggaggaaagtctagagcacaggctttgtgttgctcagagaagcatgacaggaagtggtgctgttgcctctgcattggccgactcctggctgcacctgcttttcccagaggcacggggaggcccaggcaggggcccagggcctgctgctgatcagtttgtcctgcttgcaagtctgcatcccagtacccaacggggccaagtagaaaaggcacatagtgtagtgtgagccgtagctgtcaccagatgggtctttcccctccgtgcccaaccccttccctgacctgaaagggcctagcctctttccccactggcttccaccaagttctaacacattttatatatatcgatttccaggcttgtagaggcaagacctacagtccaggagttcaaatggattcagtgttgttggttcttgtttcctagaaggacaagtgctctgaaggtttggtgtcaactctgacccaaggggtgtatctgatttttatgaaggcacagaaatgcacctgaggtgaccccaagtccttctcttttattttttgatttcccaccacctggatcattaattctgctttcaagggggatggggaaaggagaacatttcaaagcaaagttgatttggtctctgaaccagcttgtcttctaggctgtagttcaccctgatgagaatcagaaaggacagtctgtaaaccccttcactctagtgactctgcagctggggagcctcaaaaccagttccagatgttctctctccctatattggccagaagggaatttcgggcaagcaaggaggcagagagcttttgcccattcattgagtacccctgtctgcaaactgtgtcttgcttcatggcactttagggagagtgctgagcacctgggtccatttgggaccagccagcccttcctgttcctcggttagaggcatgctgctccaagctggctggttactgcaagcaagagaagcccgccttcctgctgttcagggtcagaaagcaagaccgtgctggagaagtaagtcaggcaggctaggaaggagacctgcagatgacccttgggttaacaaagcaactttcacggccctgttcaccaccagctaggatagtacagggctttgcctcccaatcttgggagacgaggcatagatagtaatggtcaactgatggccctttactcttgagaaactccacccagcctccccttatccagaagaaagccattcctgactaagcctggccattctgacgccttctttcttagtctgcacccagcctgtgctgtatgcggtatatgatggtagaaatttgcactcttcatgctttgattttaaatgcatattagacattttggcatttgtgcctgaatgctctctgtatcatcttttttaaaacatagtttgattatgtaagttaaagaatgtacaaatgtaaacttctgaaaatacatacaatatatgatttcttagagtgtatggacactgctccagaggccttgcatgaattatctctttaatccttacaaaacgaatgtgatgggtactattattcccacttcaaagaagaaaataaaaaggacttattctccctgggcattgacaagcaaagagattaataatggtaaccccaccagacatctctatgggtatatatgtgtatatacactagtatacatatatgtatacatagtatacatatatgtatacatagtatacatatatatatactagtatatatatatgatttgacatgaatgggagtacatatgttgatgtctaatctttttcactccacaatggtgctagaacgtctttccattccaaaaatcatttttaacatttacataatattataatacaaatattccataagctacttaactagttccccattgatggatgtttttaatttgttgctgttgtaagcatcctctacatatatcccatcttacttgaataattctctccttaggctaaagtcctaaaactatgattgctggatttaagggtgtgtatattttctgctttgaaacacattgtgaattgccttctagggagttgaaacaatttgtactcccacccacagtgtgtgagaggactgactcctccagccgtgtaccagctctggctattcattcattcagaattcagtcaagaattacatgaagtagctgcagtgtgccagatactgtactcagaaccaggcattgttactcttttaagtctttgccaatctgaaagagtgagtatctgtgttactacttgcatttctttgagaattagaagcgttgaaacatcttttcgtgtttcagttggccatttggatttttcttcttttgtgaattacattgcgtattctttgcttcaatctttttaaacccgttaaggtcagaatttgtctttttagtgtgtggtttttttttaattcttatctagtgttggtctaacccttccaacagttgtcatttagccagtttgtcatccatgtaagtacatatctttcttccagatattaacaaagtttatatcagtctcttggtgaattccgttcctgtaagttagaatctgcatcatgactttataaaagaccatcactgtgcctacagttctttaggaatcgctttggcattaagaatgaggcttcagccaggcacggtggctcacgcctgtaatcccagcactttgggaggccgaggtgggcggatcacgaggtcaggagttcgagaccagcctgaccaacatggtgaaaccccgtctctactaaaaatacaaaaattacctgggtgtggtggcgcacccctgtaatcccagctactcaggaggctgaggcaggagaatcacttgaacccgggatgtggaggttgcagtgagccgagatggtgccactgcactccagctgggcaacagagtgggactccctctcaaaaaaaaaaaaataaaaataagaatgaggcttcagccagatgtttttggattatatgtggcgtggcctattacatggtttttatttttgtttcctcctatttcttagtatttctttccaccagttcctgttgtaaaacgtgaccagttggtactgatgctgtacatccttgtattagtaaaaatcctgctgtgcctggaggcagggacctgcttgggccaggccttcccaggaagcccgtcctaccctctgtagcatatagtgccggaccaccccagcgctcccacttacctccttcactctttcattgttgatacatgggctaggtttcctacagagtcacttcaaggatgtagatcttatcctcccaattggattgtgagtttgttgttattgccttttttggtattcctcaaggatgttcagaatacctcacatagtgatggactcagagtacctattaaagagattttcattaaaatcacaccattcagtaagttgaccaagtacatcaagagagtcagaaagacccaagatctagtttggctttgccaggcatagcttcctcatccataaaatgaaatactagtaagatacttccttatgtgaatcttgggaggctcggagtgtccagtacacattcagcactcagtcagtgcagctgtagagacatagcgtggaccttggtggcccagcagtctcaatcctggtttcttctgacctaagattggtgggaaagtacagataaaagctggttgaggaggtgttgatagcacagagtgtttttacggagtgtcctcggagggttacatgctcctttttgttgaatccgaatctttttttttttctaatatggagcctcataatcattcaaggactcagtgtgatgccacaggtttcaaacttgccagttcgtctcttatgttctgccaattttttaaaagtgggaatatgagtgcatgtgcacgtgtacacacacgtgtgtgtgtgtgtgtctttgtgtatgtaaaatgcttgggataaaaaaagatggatcaaattttgtctggcatggcatagcaactctcacctctagtatcctctaaacatttaaccaaatggactttaactggtttacttcaattctatttttattttcgtagtcatttaaatgtatggggagccaactctttcaaatgagacattttgtcattaaaacatgttatttagtttaaccgcatgggcccggcttcagcaacattgaggactgtgaagagggttctgagcggctgttctctcctgacctgaccgcagcagtgacccaccagcttgcaatgcacgcaaactgaaacaggcaggatggccagcccagggttgtctgcacggtggtcttggcatctgtaccttaggttgccagctcctggccctccttgcctgcatttggtggcccttggccctgccgtgtcatatggcacaagagcccttctggcccgcatcaccctgtgtactgattaggcaggaatcagcaaatccgttgagtgcatgtttaatgtgacacagatgtgggacatactacagatctttctgctttacaaattttcagctttttgcatttcatcagtgttgcttattatttacagaatgtaacttgagacatcagaacagattgtaatttttaaaaaggttgttgggggggtgggcccgcaggggatctgggagaaaaaatccagtagtgtggaatgttgtttgctgtccagaccaaacaaaccagtttgccaagggttgatggactatgacaatcagtccaattcatgttaacactgggggcacttaattaaaaggcagcttgacctccttatcaccaaataaagaataatcttttgttaccaggttgaccgtcgcagcaccaggcagaaatgtaccccttgtagaggcactgaagggtaccaccaagctgccagctcgtgtcctgcctccttcctgtccacagagaaaggcaccattgaacccagtccccactcagacatgtggatattcttgcctcatgcctgctgtggctttacacccaggcgctatggcaagaggcggaaaaaagaaatctcttcctttgcccaaaaatccaagatactcttgagggcattggaatgatgagccaggccagtttgacacaagttcaaggagaaggtaccatctcttgcttctagaggggcacatctggctagaggtggccctggcttctgagaaagctcagccataggttacatttaagggcaaacaatgaaaagcaccagctggtcgggaggaagatgaggaggagtgggtgattggttgcttctttcctgtgtctagttctaaagaacttaaaacttgggtccaaaataatgagagccgtgttgtaaaaatcatttgaagagagttctcctggggaatgtgagctagtgccgtgacctgatcccttggtcagatggttctgagctgtttaagtgctgagtgtcaactgtctacagggagccaggcccctgaggagcggccagggttccaagccccactgttcttttccttcctggaaaagtgcagacggtgcacgttccccggaggccaccaggcagctctccagttgccctctgggtgaacgtgacccaggtcggtaactttctagtgtcccccccacgttggaatgatcagcattcctgtactccaggggttcttgagttcttgagttgttaccaacgccctgcctttctctggctcagattcagaggaggagttccactgcggactgccgcttcttcaccctctgggcttcggaagcagcacctctggctcccctgcacccagtcctcagtcttgtggccctggtctgcccctttatcacatgtcttgagcaccctctcagcacacagcaccgttctgagcgctgaggtgcgaccatgcatagaagagacaagaatccctggttccgcatggcttccctcaacacctacgtttccaggccatggcttgggttcagaagaatcaccctccctggaagagatgagtgactggaaggagagcatgtcactggctcccctgagaccctcccaagagcctcagtttctccctctaccacctgaagtctaactgcagggcctgaaacagattctctttaaaaacccatgagtgtggtgactgcataggttttcattctcctgagttcttaatttccgtgtccctagcactttttgaagcatctgctcctgttgcccctttcttttcctcctcaccctcctccatagtctctgtttgatagtagaaggagatttaaaacctccaggctgagtgaacaggcggtcttgaaaaagcaaacaaatcgggtcaggcacggtggctcacgcctgtaatccccagcactttgggaggccgaggtgggcggatcacaaggtcaggagttcgagaccagcctggccaatatggtgaaaccccgtctctactaaaaatacaaaaaaattagccgggcatggtgccgtatacctgtaatcccagctacttgggaggctgaggcaggagaattgcttgaacccaggaggtggaggttgcagtgagccgagatcacaccactacactgcagcctgggcgacagagcgagattccatctcaaaaaaaaaaaaaaagcaaacaaatcacaaagcaggtcccctctgggggctggagcatcctcatatctgcttggctttggtcactgaaagaggccctgggggagggggcttcagggcttcccaggggagaggtgacagttaggacacacgcctcccccacttcagtcaaggcagcttcattgtcagcggttgtacgtactaagattgtgttacaaacttcatttgcagaaagtgttttacccctgaaatttttttttgaaagcgcctgctgtgagttttattaatggcacttttctaaaacttcattaatttcaattatgagaatttgatatctggtgtaattcattgagctgctagtttgatttgctctagctcgttttaaaaagctctgtcaggcaacaggatatggatgggagtgggtcaggtgagtgaaaacgttttaagcactcctttcttcagaaaacacctctgtacccacatggggtgtgctcctcaggagtcattcagacaggtccaggagaacttgtcccccagggtgctccgtccagatacaattttaaatactgcactttcgcattttggtattttcaatggacttgacacccaataattctgaataaaggtaggaaagagggagatgattaacttttacaagtacctactatgtgccaggcactatgctacacattcttcatattttatctcaacattatcaaccaagtaggtattaagttctcacctattgatgaggaatctgaggctaagaacaatctagtaacttcttcagtgtcacccagctaataagtgactgggatttcagcctgtgtttgtctttttccagtctatgtttgttcctttatactactttgttcttaaatttcatctcttctcttaaaagaggtcaactttgggagaaggtagataatatataaacattgaaagaaaaagattatataatcatttgccagaaataaatctgaaaatattgggctggacacggtggcccacacctgcaatcccagcactttcagaggctaaggcaggaaaatcatttgaaccaaaaaaaaaaaaaaaaaaaaaagtagtgaaaatgtatggtttattaatgtaatcagcttgttattattagcatgcgtacttaatagccacaaaataaagcttaccagagatggtgtatttcggtccttgtgaaatatcttgggattggcattagaggtgacaggttagcaaggaatttgataatggcttgagagattccaataagcactacactctctgactcagaatgttctacttagaacacaaagaaagcttacaattgtaaagcgccttgttcttccatgatgttgaaagttgcaaaccactttataggttgtctactattttgtaaaagcaaagcaaacccagaatgcatgcaaaaattatggcctttaaagaaatccaagccttttaggctccattcttactataacatgatctattttcttggaattctttataaagtaactctgcccctccccacccagccattaacaggtagtctcgcccctgaggcagttgactaagaaaaaaaatctggagtatttttgtcttagagtttaaatcccaataggtgtatctgttggcattagtcctaccagctgtcacagttgcagtgtcatggggtccccaaaacatgtgttaaattatgggaagccttgacccctataaacaagtcaggtgtgaatcccactgatgggagaaaacccagcccaggaaatgtcatccctgctgctggatgtcaaattgctaaaaacttaacaatatcaatataatttctaatgatttcttgaatcaacatctttcttacattttcaatggcaatagtacaacatgggattttatgtgtgttatgcatgtatgacttgagaactctagggagaggtaagtagaatgttaacaagaaagcaaaggggaaaggaaaatacttcagtttgaagcagtgagcctccccagtaggaaaactaagtacaagaggttggatgttacaccctagcccatcttagatcccagacacctcaactagggttcctcgtgtgcacccatggcactctaaataatacactaataaaaagaataggtagcattttatcgagtgcctattatgtgctagactctgttctaagcactgtacatgtattgacttatctactcctcacaacaacccatcattacccccactttatagatgagaaaaccatcgctccaagaagtcacataatttgcctgtggttacagttcgtaagtggtggagctgggattcaaacccactgggcaggctggctccagagccgatcctctcagccattatattatgctgcctactctagtgctccctgtctctcctactgcttccctgctgtgttcttgttgccatttctgttcatctcctccactgaattgctgtaagctccctggatacttaattcatcccagtcttcttcaggacctagtgctggcctctgcatatgatagtttgggaaaggttggttgaataggggactggaggaggcaggcacaaaccatttgcagggctctaagtaggctcgtttttctggctaccctagtttggatccttagtcagtaattccatttaagaaccaatctctactagcatagggtttctttctgcccaacctattttccatgtgtccaaaatccaaattgtcccaacctacggattgaatactatctttgagtgggttctagaaggtgtatttctctttctcttgaaaccttggggaagaatttctcatgtaaacagaggcaaactttagaaattttcatcctctaatagagtcttctctgattacagtttgcactgaaaggagtaaaatctgtttatggagaagaaatgcttttccacttcgtctttagaagtagatgcatgtggccaagaggagggagctacacgtcagaggtagttgcagcctatggcatgatgggagctacaggtccgagatagatgcagcccacagcatggtgggagctacagatctgagatagatgcagcccatggcatggtgggagctacaggtctgagatagatgcagcccacggcctggtgggagctacaggtccaagatagatgaagcccacggcatggtgggagctacaggtccgagatagatgcagcccacggcatggtgggagctacaggtccaagacagatgcagcccatggcatggtgggagctacaggtccaagacagatgcagcccacggcatggtgggcttcttgggcttgcagacattgtactgctgtggataccagagggtttttcaccaattcgtctactctactgcagacagtactatttagacagactgcggggtttctcttagagaaatgacaaatgtttgattaggccatttggtcaagaaccctggtatcttgtagctgttatcagtgaccagtattggaagaggtagtctggattgaccttcgttctcagtctaattgtgcacactcgagcacagtatatatcagtaagatacttgattaaaacaaaagccctggacacatacataaagtgaatgcaagcacaacccatcacacaacccttaaggaagatggcagccatcagttgaataaacattctatgatgctaacgtcacatgtgtgacatacactttctactcacttactgattgtttttgaacatcacttggctgatagacattggccatgacagacttctcaaccaaattaagctgtgtaggggtatgtgtatgtgtgcacagcatctgtcttaactaacagacctatgacatagttactcatcgtataagctacgaataattaatgcctggctaaatgttgactttcaggctgaaaggcaagatcaaccaagtggaattggctggatctccctgtgtcaccttgtttggatttactgttgattttttttttaaaagacatgagttgttactactctgatcattggttttgggcctccggtgtatatcagatagcaatggccagatgcaggcacactctgtattgattgccctcactggaaggatatctgcagtgtatcagccactgtatccacagccccttccctgggggaagagtcctccatgctgtacagcagactccctgacattttcatagagttcaaagctcaagttggtttggtgctgacattctggattagctggttgactggaaggactgcttctttctatacactgtgaaatttgtaaaccgcagcagctgagggcttaacatggccgacaagctccagctggcagcaattaaatataccgcagacctttggccaaacaaaggtttgtggaggcagagttgctgcatgtgcgctgaacagactcctaggttgagtgttggttcataagagatgctgtcgactaaggagaggtgagtgggtggattttggccacctcttgttcggtgatccattgtccccagaattattgtatcaagaccctgcccaagtagcagcaaaggtggtcagaggaaaggaacaaagccaccagggaggccgcaggcctaacagtggtgggcctgagtcgtttagacgttgatctgctgctgtagcaccaatggcaggatctgcagctactccacttttttaaatttattaatttatgtatttattgggtaccactatgctgtaggctataggctgaaaggagaagatgggaatgaaaaaacaataagaagacatttaatatccattcaagcagcaaagattcaagagtctagaccagtgctatccaaaatacaatttaaatttaaaattcagtcctttagttacactggccacatttcacatgctcagtagccacacgtggtcagtagctatgtattggacagtgctgtcctagacaataccaagtgttggatatagatcgctagggccccttaaatgcctcattggcaggaatgtaaaaatggttcagccacttcgaacgcagtttggattatcttgttaagtgaacgtttatatcttgtgagccagcaaattccccctagatagattctcaaagttcaccaggaaacacgtacaggaatgttcataatagcatcatttgtaatagcagaacctggaagaaacccatgtgccatcaacaggaagatggatatatcatgggatagtcatacaatggaatatgaacaaagcagagacatggtgaattaatcatggctacacacaaaagaatacctgaatcttagcaatgtgacagcgacatcctttttcaaaagcccaaaactaaacccaaagaacataacaagaatgtactggagcatcctttgaaatgtggtaaggctacataaaaaagaaaagcacaggaatgagaaacacaagattcagaacagcggctgccttagttaaaggaggaacagggatttggggtggcagaagaccaacttgtggtccacgattgagtgatggagtttttttttttttgctttcacagatgtttatttcaaataaataaagagagcccaatgatgagagtgggccttgaactgaggataataagcccagtcctaaagaccagttattaaaaaaaaaaaaaaaaaaggactggccgggtgcggtggctcacgcctgtaatgccagcactttgggaggccgaggcgggtggatcacgaggtcaggagaccatcgtggctaacacggtgaaaccccgtctctaataaaaatataaaaaaattagctgggcatggtggcgggcgcctctaatcccagctactcgggaggctgaggcaggagaatggcatgaacctgggaggcagagcttgcagtgagccaagattgcaccattgcactccagcctgggtgacagagcgagactccatctcaaaaaaaaaaaaaaaaaaagactagagtcctttccctccaggtgctcataggcttactggaacatacaggaaagtcacttaaaaatggacacactgtcactgagcatgaacaaatgtaggactgctgttacatggtcatactcgtttaaaaggcctacttgaacgtacagtgtcacatcaacagatgaagaaaacagcgtcgtcacacagtggcctgggctgaagaacttcactttaaactttttgctggcttacgaggtttgaaaacactagcttactgttagctttttacattattttagtaattctttaagattggaactaaatttgttcatatgcagtgacttcaaatactctccccctacccacagcctaccaacttggacctgagaaggtaaatttttagttgagttttagagaagaaagaagagtttttcaggcactgacattgatgaggtgatacaggagtggggggaaaattcctttaatccagctttctgcttctaggaagagtatgccttctggaagtccttgtattcataagactgtaacagaagatgtttccttttagggtaaaattgaactcatctgtcttttcttccatgttgatgtgaaaaattagccttgaatgccacagtgagctcccctagtcagcagtgttgagcactgaatccaaccttgcccttgatattatttgatcaaaagtcaagaaccctggaaatgggaagatagtttgtggcctgttgtgaagacagtcaagaaaagaaacataatgatagtcagtgtgtatcctcaggggagccactctgcttttgtattctctgatgttttggtgggtttgcagtttacaggttaaaaaataatgtattgggagtgggggtgaggttggatcactgaaacctgggtaaggctctgagggagtccactgagtcaggaaataactgtttacactagaaagctgtttgatcgtgtgagaagatcaacaaggtgagccctttactcccattctcaactattctggagctgtcatgagattaaatttttaagagctcgggtccagaaacaagccatctttcgttggcttctctggcttcctcggatccaccagaggcatttaggacttcagcaagttttctcctgcctggtagcatgttttccctcagctttgagtactaatgaaaatcctgcttcatgtaagggaaaggcctgtcatcagtgtccgcttcaggacactgccgtcatgtccctttctgtgttttgatcagtggggcagacagagacagccttgtcctttctgtcaggaagatggggttctagctgcttcatattttgcctcaatgttgattttgctttcagggctcaaaatccttagtcttcaaactctccaccaaagcttgcatactggccttcctgtttagctcaattaatggcccttataccgtctgccagccaccaggcactcactcgtttattcggcttatcctgactgctgctctaccataaaccagacactgttctccatcccaggaatgcagtgaatgaaacaaattccccctctcctggagcttccagtccacatgggagccaagcagtaaataacatgtttatccacctgggatggaaagcaaatgtgctttgagcagatgactgacttgatgtaacttaccttttttttttttttttttgagacagagtcttgctctgtcgcccaggctggagtgcagtggcaggatctcggctcactgcaagctccgcctcccaggttcatgccattctcctgcctcagcctcctgaatagctgggactacaggcgcccgccactcccccgcccaccccagctaattttttgtatttttagtagtatttttagtttcaccgtgttagccaggatgatcttgatctcctgaccctgtgatccatccgcctcggcctcccaaagtgctgggattacaggcgtgagccactgcgcccggccgatgtaacatcttttgaaagggccattctcattgccatgaggagagtggacaaggatggaaggaaagagaacaaattatgagactactgtaataatatattacaaatccagggatcctttgttagttatgatcgagatggagaaatagtcagatttgggatatatattgaatttgagcctgcaggcctcccagttgattggggaagatatgttgagacgagtctgaatcaaaccttacgttgaaagtgatgaggaagcagaccctgccatattcctcttggagagcctttgggcttctaccatgtagcctgacagagaggtcagcaggactgccctggggaaaggatactttattagcctgtgtaggcagttattggaatgacagcaagtgctttgctaggcaaggagataagaacagagctctgctacgtggagaggcacgccaagctccttcccccaaccccgctgcctgcagaggttaccagcatcctctcggcagcagtcgtccagcttctctcctgatgggttagcagcggcccctctaccgccctccccactttcgatcgatatttgggctctgagtagccaactgtaagcctgcgtcttgaaggaaaaattgagactggcggggtatgtgagtgtgtgatataaacacaatgggttttttactctttcccttagtgcagatcattgaaacttctataaagtctctgtaatacccttagagagtacaattaatagtactgaagacgtccttataactgaacttttgtaaaattattgctggatttttgtctttccagcacacattaaacctcaccaaggtatggggctgtccttcagatgtcacagcctgatgaactgagtgctgacctggctttgggagcacttttcagttatcccagctgtgcatggcccattgcatggcctgtgacaattttctggggttgtttctgtccatatttccaacctgacttgcccaccagggcactttctgcccttgtaagtaaatctctatgctgcttactgttagttcctgtttctgaagtgctgattcgatgtgtaaggcttctcctctcttttagatctgtctagagaggagtgttttgcttcagtgagctccaggaacaaataataagtacagcaagtacaaggccgaggacagacccagtgcactcttatcagtcatctgaaatatgcacagcctttccaagacaaatgtgcactcctgtttctaggaaaacaccagaaagtacttaccaattaccctgtatatgctgtgtggaaaaagacaacatcagcctaccctgaaagccataacaaagcagattcctccgggccgccgacagctgagtggcccgagttagagcctctgcagaatcccagcctgtggcctgggccaggtccaggtccaggtccaggtccaggtccaggtccaggtccagggggcattcttcccctcgcatgattaccacgtccctcaccctttgcccaaggaactgacctcatcttagaagaagtctcaagggttggtgtgttcttactaagtgcccaggattttcttccagacccatcacaaatccaaagatggctctcctgaagagaggcctaaaaaagagggtgcggcccagggggatctattatagtaataaccgcaggaacgagagccgccgctggtgggcagctcaccatccgccaggagcaggcttggcgggcactgttttatttggtcttcacagcagtcctctaaggtaggtgtcatcgtcctgtttcagagagaaaacggaaactgagggttaaggaaggtaaccaacttatccatgatcacatggccagaaaatggtagaggcaggattcaaagtcaaatgagggtctttaaccgctatttcatggtgtattcacaggcagtactgtaggttaattctgttcactaaatgtaaagtatgtctcgtattacagagtgcttttgtcttagtgagaaaggaaaatcattttaacctgcacacttaacctcttggctttatgtccatttacccatctaggactcaagcacagagggttcggaaaccgcgttgctgcacggggccccaggggctgcttccccgatattctgagagccaggcggaaggacaggagcagctcttcaaactcacagacaacatacaggacgaattgtaagttagagcatgggaaaccagccctgtgggtctactgagttgcctcttcttttgatcctgagaagtctccatctgatctgagttattttcatgactcttggaccttagatctggtcaaagaattccttgccccaaatgttttttagatttagatataactgatgctaaacagccttttactcaaagcagtggttctcaactgtgtgccatagcctggccttagtgttttgtttctagaaaatgacagtctctttctagttagttcaaagagagaagatcatgaataaaatgttctcaattttaaggtttttctcctgtaaaaatttcttaaagtttgatatcccatttttgccgcagaatgctagcaaaacaaaacagaaaaacaaatagcaaacaactaatagttggacattttggaaatgtatttttcgtaagattgcttcgttactctttaaatatggagccttatataccttgtcatatcttcagttagtgatattattcctagttgacacggtagagttaagtatttcactattttaggatattttgcagagatccttgtagcatgaaagtgctctataacctgaataggtgttagaaccaccagcccacagaaagcagttagttgtgtctgggagtagcaaaatactagattaatttcttctgatgcttatttgccatctcctttaaggtaaagcgagcgtgggggattctgagtgctgtgggtgtttttcggtgggtggaggaatgtctgaaatagacgtcaactgtcaggatagtcttcagagtcattgttagggacagtgttaagtagatctcatctcatagtttcatggtagtatttgaatggggatatcaaaagccaactccagaaggtatttgttgcttgccggatagaatggcatcttcctacatgtgccttgtgtgacccctgtggtgttattagaaggtctcttgaagatggagttgtactttcttgtttcgtctacttgggttgccattataaaatatgataggctgggcagcttaagcaacagaaatttgtcttctcacagttctaaaggctgagaggtccaggatcaaggcatcttctgattctgctgctgctgggggttctcttcctggcttgcagatagccctcttctcactgtgtccccacattgcagagagagagggggagctctctggtgtctcttataagggtactaatcctatcagctcagggccccaaccttatgacttaatttaactgtaattactttcttactccaaatggtcacattggggttagggcttccacatatgaattggcggggagggggtaactctgtccacagcaggtgttgctaataggttctgccgtttcagtccagtgcccagagtgcccatcagttcactccagaactgctccagttcattccttggggcagggatttggtaccatgactgctcttgatattgctttgtagatggaacttttagcctttggatggggggtctagagaccccccatccaaatttctcaggtctggcaggatgtggtgcagagtctactacaatggcagccctgtgaggctgggatttttgcctgttccattcaggaaagaatcctcagcacatagaacagtgcctggcatctaataggtacccagtacatatagccagatagctgcagttcagcatttgtgttcacatgcgtccattttccattcatttgggggttttttagtcacaggctaaatgagattataaattattgcatgttttcttttcactttcctccccaactcacctctattcaagtcgaactatctctggtcactgtgaaatttgtttgcaatagaagaaattgcgtggtacagccaacataggactgctcccagtgagatacacacattgaaaaacagagccagagagagctaaaaactggaatcgaaatgaaatcagtaaaatagctttcatgaaactcatgaaattcatatgaactaggaagagatattggcatgaatgaattttgactttaaagatgaaaaccatgtgtctccacccaagttgtgggttaaatcttgccaatgaatgctgaaggaggcacgtgaccacggccttcccaagtgtacaaggaagaagccatcagggagtgtgtcgcatgttcctctgaagtgtcctcagttgtcagcctgggtcttcgcggtggagtgaacattacactcatcactctgcaagaaaggagttttcaggaaaagcccacgagcgccaaattatacctctgacttttatcctagatttgtaattaaaaacatgtttaaagacctaattatttgcgtatttcccttcagagttaacccctttaaaggatctttaataccttgctctactgttctgactaaatgtttccacatttttttccagttaggctcactgtttcacttctggaaaatattgtgtaattatttcccgatggagtgaaaaccccacgaagtccccagtgccttggtgacttcaactttattctcccagatcgagttgcatttaattttgtcattctatttaattaattaatattaaaaagatagttaccaacgtatgatttctggtctggccagctgaaaagtcttcactttcaaattaatcatatattcctctgataagttgcacaattgtcattgcttcccatctttctcagttttggttttgaaacaggatctggattaagatgatgttaaagtaaaatttgtcctatatggtgaaattaatttttctttctaactcatgtctcatttgtagccagaaactcattttcttttttttaaggtacctattttatttctaatactgcatcacctataacggtgcacaccaggctggtgagcagtagggtggctcctgccttttaaaaaatgctcatgagcaacccacatgacctacgaagctgctctaatgtactgctttctggaattaagacaatttaaattgtacttttaaaatatagttttagaaagtaacatttatgggattttttaaatacagaaaagtataaaaaataaaagtaccctatgcatccaccagccagataagttgttcctcttttcaattttttgtagagatgaggtctcgccatgttgcccaggctggtccgaactcctggcctcaagtcatcctcccacctcagcctcccaaagagctatgaggccaaagtgggaggatcgcttgaggccgggagttcaagaccagcctgagcaacatggcaaaaccccatccatacaaaagttagccgggcatggtggcacacacctctatccccagctacttgggaagctgaggtgggaggatggtttgagcctgggaggtcaaggctgcagtgagctgagatcacgccactgcactccagcctgggtgacagagtgagaccctgtctcaaaaagatactcatatgcatggttagcaaatccaagagtatagaagaaaataaaatcaagagtaaaagtctcttttcttatctactttgtaaacatgctgtttacgatttttgtatcttgtctccttgagaaatttcacagagagagagcaatcaggaaaatttttgagcgcaccatataatattgattctaatagcatatcattataaatacaaaccttatagtaacatatgtagtctcaaggactatatatgtttcattccttctgaggaatggaatagaatttattagcttccatttcctaaaccaggaaataatgtactagtaactgttgacacttacagaattggccatttgttgatacacctctgaattaaaacttggatttggcagatggctcagctactctgataaagttaaaggtttgctaaatctttaaaagctaaatcaggagttctaagagaagttttcaactttcctactggtaacatgtgtccagcatccaaagttgcctgtgcactggcaaatttcttgccttaccctaatgccagtgtcattttctgagacagactaacgcatacatttattgaatcctactatgtgccagggtgagtaagaaatttcctctgtcctcagtgcgttcacagtttagcaggggaagcagacactgtattaccaacaacctataacatatattgctgttaaaatagaagtatgagcaacgtattatggaaccacagatgggaagtgattaatttatactggaaagccagggaaggcttcacagagaaggcgctggatgagtcgcctgaccttgcaggaggcggaggaatgtgccaaggagagaaggcgcctgggcagagcacagtgctgggcagatacacgggacagaagagctcacggcaggtctggggaatttggggtcagctttttgtagcagcagcacgtgtggaaagaaggagcagaggctggaagggtgggttcccaggcctgttgctgaaggctgaccttagtggtcatgccgaggagcttgcctctcctgtaggtgggagtgagattgtgaggaagaggatcccactcaaaattcgtcatgaaaaataaaaccttgacagcagcaggtagagagactgaaggcaggaagccagttaggaggcccgtgggatagtccaggtagaaggtggagaggcctgaacacagtggccgtaacgatgactagaagaggacagattggagaggcatttaggaggcagcatcagtggaaccctcaactgctaaattggaatctgagtgaggaggagggttgagagtggcttcgggctccttgcctgtctggttgatgaggctgggggtgctgaagagcaagggttggagaaggagcatctccccagtggacgagctgaggtcccctgaagagggcctggcactcagagcgacactgggcccagacatggagtcagggccataggtggacctggggtgggtaacgcctaggggtagaggagcctgttccaggagctctgagtcaggcttctgattttgaaatgactccagagggagtagaatcaggtatataaatgagttaatatcgaaaaaaaaaaaaaagagcaggaggaaaattaagtagagtggctgaaacagttacttggcagatttctccctgagagaagctggtcatgagtctgttttccatgtggccttctagagagacatctctctccaatctgctgatgagaggatgtgtggggaaaggaggggtcatcccccacaggtttggggtaactgggcacctgttctcaacagaagagctaccattaactgcggatctcttctgtgtggggcacgtagattagctcacaccatcacagtggccctgcagagtagacccatggggttctacacatcaggatggggaagctctgggcaaagtgagaggcggagacgactggcatcagggtggctggctcccctggcgaggctgcagtgtggcttgggaggacgttgtgacctgccccagaggaggcctgaggctgctgttgatgctaccatggctgctgttgttgagaatgccccgtggttcatggtttatggatgacattagtgatggtgcattctactaaggcggcactggctcctggcagattcacccactcttagcacctgtcatcttggaaaagggtgtaagctggtgctgcagccttcccttctctcagaagaaactttctgacactgagccccaagcccagagtatcctctttctctccttaaaggggagttaaaacttttttctttcttcttcttctttttttttttaatagagatggggtctcactatgtggcccaggatggtctcaaactcctgggctccagcgatcctcccacctcagcttcccaaagtgctgggattataggtgggagccaccatgctctgccctaagagttgaaacttttaaccgaggtttaagaatagtataaaaatcctattttttaaatagaatcaattatagtatctacagcaacctaaaatgtgtcaactgaatactgaggtgacttctctaggtctcagattggaaggataaagcttatctgatgctgtgtgtttctggctgcatttttttgctcccctttcctctcagttaatagcagatcagagaacagaaggagtttgctcagggccacctgagaccacggtggccttcttcccttgaggtttttccaacagtcactcattcgtggaccaaaagcaggccttgcgggaagcttgattctaagggcagtgaagacaggagagcctggggttgagactacaaagcagtgtgagcactcaaggaacctcaagtgaggcaaaggaaagcctgggagaactaggccagggaaggggaattacctgtggctttagggaaagggaacggaagaaggtgcagcttggcagaggggagggcggggagcgtgccgcgtttgccaggcttctcttaccaccctgagttttgctgcttctctcacagagtgacaagtttgatatgaggctccattagataaggggtctggtctggagctgtttaattattctttgatgtgtttggcagattttgtaaaaaaaagaaaaagaaaaaattaaaattaataataataacgatgatgatgcaacccaaagccctggccattgtgggatgcaggaaagcctcaggaggatgatggggacagagctgtggccacctggtccctggggtcactgcccagttccagctgtggcctcactctctcccttctccttcttcagccagacccttggctctgatctgcttttgatttgaaaggactttagaacatttcatgcacaatttccagaaatatgttattatcagtagcagcttcggggcatgcacagggtcctggacttacaggacagagatccgtgtggagtgacagcactgccttcctccacttacctttctgtatgaccatgaattccttgacctccgtgctcactttgtgaagaaaactggcagggattaccctctccatcagagagatgaaagagtctgagctaccaagaaagcaacggactcggccagagtcagccagcgggccgggctttcctgccagctcggcctgtgtttccttcgctgtgctctctacttttccggagggcgtcccagctcagagtcacccctcctccagaagtggttctggcctgatggaggacttgaaccatctggggcatcttggaaaagagtctgtttgaaagcctatagaagtgttccaggatggaaagcacactagtcatgtcggccactctggcctgggtgtgagagcatctgcccggatgggaagcccttggctgacatgtaaatgtcagctatgtcaagtgcccagggtggtggcgctgggggctgggggctgggggctgggcaatgaggtggaagtgcctgtgctgtgctcacctagaggaaggaacctcacatctcagttggatttttcatgcacattcctgctgtcatcccaatcatggtggccaactttggagtctccttggagagcctgtgacggcctcagtggctgtgcaccaggcccaccgatgctcaggggtgtaggctgcttccgggtctcatctcagatccccgccagttctggctggcgctgtgtcacctcttctctgtgtcaggatcatttttatccctctctgtctgtctttctgtctttccctgtgccctcctttcttccccggaccagctatttcagattccattcaactctgttcagtgatgctgccgctctcaatgcggttagagcgcaagatgtgagaacgtctgtgctgagtggcctaaacactgaaggctgcgggtctttctaatttcagcattgagactttacaagtccacattcttggcattgccaaccagttagaatagaacaataaatcccagtttttgtcatgggcgtctgtaattaaaatggcaactggaacaaggcagtcacttactgagcgctgatggggtggccaactctgtggggtgctcaggaagacacggggctgtgagatatggactccacttagagggctcacctcgtagtcagcaaagagacttatccaggacatgtggaaagaatgagtttgtgcttggccatgctttgggggccatcacaattaaatgctcaaaagtggaggaggggctggagtatgtgggggatgcttcacagagaagttagaacctgtgatccttgcggggagggggatgggatctagagaagttgggagagcaggtgtgcgtcctgcacggaccccaagtgagcgagggcccggcagcctgctcccctcgacaggcaggccacctcctgcccccaggcttctgcccccttcagaggacctgggaacaacgccgttctggacccaggtttcagaacacttccaggtggagcctggctctgagcaattcagtttgccagcaggagctcgactgccactccgtcgtcagcctttagtattcctgccactgtccatccttgtctgctgtccctggacactgcagccccattgtgaagggctgtcacaagatgcaggggaggcagccaggcccgggagaactgtcacactgttcccaaggttcactgctcttcattcagtggccagagaggtttgatgtgcataaatttccactttgaatgtgtgagctccatgatagaggaattcagttttgttggagtggccctaaagctcctgaagtaacaactagaagtttccaaaaggaagatgacagttttacctaagaaagcgttttctgactctttgagttttctgaacatgaagtggatgggggggtgccctgtccctggaggtgctgagcttagagagggaggaagcggatggggaggtgcaggtgttttaacgccaggctgtctcttcatggcgtgccatttggtgaacctgtttaattctgcttttcccccctcagctttcagcgcccccagctgcgtcttctcgccccttcatgtttccctctcctctgccaggcagtgaactttctcagctgctccttcagtttcacattgaaaggcatcgtgttttctgttttgtccaatagagtattgttacagttttctgtaagctttaagctatccaaaaatgctcacagaaaaacaacaaacacccacaagatagaatttcaggatttagaagtatttcccggcaagggggccgggattcgcactcaggccctggggccacagagcccgcagtgggcctccccctgatgctgggcgaagccccaggtgtcactcctgtgttcccgtctcgctttgcagcttcatcgctgtggagaacattgacagctactgcgtgctcatctcctccaaagctgtttacttcctgaaaagtggagactacgtggatcgagaagccattttcctagaagtcaaatacgatgacctctaccactgccttgtctccaaagaccatgggaaggtgtatgtgcaggtgaccaagaaagccgtgagcacgagcagtggagtgtccatccccggcccctcccaccagaagcccatggtgagtgcctggctgttctcaggctcctgaggggcggggccagggcctcgatgcctctgccctgcttccccgtcctcagcaggaactcatttaggaggttgaggctgggcccttcccaggagtgctgcctctcagtcctgaacatgggaggggcccagggtatgttcacggggcgatgctgccctcccagctggcccatgggtgaccctgggaacattaactgcctcacaacgtttgtgcctcagttacccgtagatgtagtgagggtaacaatacttactctcgttggtgataaggaacagctaacacaacacacagggtttttctgctcccaaaatgggattcttcagtgcaccaaatcgaagaaagcactggagctcacgctggtttctccattgtttctccttaacagtggaaaccgtaacttttgttctagtagcatctagcatgctcaataattatttgtaaataaaagttatactttccctccaaaggggacaaggtattgttatgacaaggcttttaaataataaagctcctgcgaatagctaacgttcctagagggctggctgtcttgtgggttgtctgatcactgtgttgctgtcatcccctcctcactattggtcatagcaggtgattcattcaaggctacacagctgaccttgaggagccggggttcaaatccgagtggcttggcaccagagctggctgcagagcctcttgcggatctgtctctggccagtcggccctggaggcttgccatgacacccaggtgttagtcctgctcattctcacccggcatacccggattttgaagcttgcattcaagaatgatacattaatcaaaagggcctgcccacctctgctctctctatggatcggaaatagcgccagccttattgggcctctctcctccggagtcctttggcctccccctgctcatgaatgcatttgggcctgtttggacttgtgtaaggctcccgtggggtcattggcttaagttagagctggctgatgaagagggcgagcacctcaaagtgtgagtatttctccagatcccttcactgtagcaggtgggcagcctcgcccactatacttctgcccctttcaaagcaggtgggcagagaggtgtttgtggtaagaaagacctagaggcttttgttcgctgattcttcttccttcatcagccatcaccagaccttagatgtgaatcccccattcttgctcttggtcttacctctgcagatcagttatggccgtgggggggagttcccaaatgtcaggtgagtatgggttggctgtacagtcctggggaatgtttaaaaagaccggctgggcgcagtggctcatgcctgtaatcccagcactttgggaggccgaggcgggcggatcacgaggtcaggagttcgagaccatcctggctaacacggtgaaaccccatctctacttaaaaaaaaaaaaaaaaaaaaaaatcgttagctgtgcacatgcctgtagtcccagctactcgggaggctgaggcaggagaatcgcttgaacccgggaggcggaggttgcagtgaaccaagattgcgcctaggcgacagagactccgtctcaaaaaaaaaaaaaaaattgcagggacccaccccagacttgtgagtgcgagtgaagcaggagcagccctggccatcactgtttctttgacgtgtacatcccatcctgagatgcagctgggctgggagccgccacctgggtggatctgattcctggatttccccatcctggggacaggtgacccatcctgttctcctccttaggtccatgtgaaatctgaggtccttgctgtcaagttgtcacaagaaataaactacgcaaagagcctctactatgaacagcagcttatgttaagactcagcgaaaaccgagagcagctggagctggactcctgaagccccgctgctgagatgggcgctcccgacacagcgcagacccaccaggaggaaagaggcccagctctcagctgacgatggaggcagaaccggagtcgggtttggggaagttgtcaaggaatgagggaaagtaaatcctcatgaggaaaagtacaaatggaaatcgtattaatttgtgaggcagggagttattttagattatgggaaataatttttaaaggtattggttaaataacgtttaaaaacatgtactgagatgaatctaatttttagattgccctgtattttgttaacatgtatatatgtacaacagtgtgtttgtaaatatataggaacgtttctgaacagggtctgtgctatgtgtaaaggtttgttaactgtaaagtaatataaagttatattggatcttctattgcactaattctagatgtctaattcaggatactgtctatagaaaggcattcttaaaagttaaagaatgttacgtcttagttttggagactaaagtattcccagtaaagtgggttgaggtgagggctgtggtcctgaaagggacgcctttgacatcgtggctgtccagttgggctgtgagctgtggcacccaggactggcgctggcccttcagaaggatctaggagaggggcttgggagcccacttttaatttctcacccccattttacaaagagtgcttagattcttacaaattatgatgtaagttatccatttggctttttcctaactagtcttaccaaacttagggggaaacctgtgctccattaccacatgggtgcaagtcagcattgtaagttttctcaggttattattattagagaggttggaaacattggtaaactctgttgattgagaaggaaaaaaaaagtcccattgaactgttgcaacaaatcagaaatccacataaaagtgctctcctgcctgggcagcaacaaccaagaacaaagccccgggactgttttctttttaataaagccacaggcaggcatcgtagctccacagcccgaggggacacaggatggaaaccccaggatgagaagggagcagggagagttccagaaagggggatgaaataggagtattaaaaagctgcgttggtaagtttttcatggaaccaagatttgacaaaggcatctcttatccttggttttaaattcctgctgggagcaaggcctggtatgagcgccctgggtcttgtttttggtgtttcgcttttctgtaaggattaagcagatagggagaagggaaaaggggcctcactttagaatgaatgagtcaccttgtgatttttaaatttttattttaataaagctaatcaatttctacaaccttgtcacatgtagctgagtctgggatgactcagtggatcagtggatgcgtggaaggttttggtgtttataactcatgacccaaatccttccaagacacaaatgaagctaatcttcttcccctccctttcctctcccacttcccctctgtgtctgtgtctgtgtgtgtgtgtgtgtgtgtgtgtgtgcgcgcgcgcgcgtgcatgcagagaggaaggaagggagctttagcacaagtagctacatagtgttcaaggatcagctttcttgaactccgaggcttggttgcctttgctgaactccaagttagtggattgcagaatggaaacttggcttttgcggcactgggtgagttttagtttgtgtgtgtcttgctggggggtggtgatgattgtctcagcactcacgcactgcacaagatggcagcaggatacagcactgcacaagatggcagctcctctgcagcttcctcctcagcctccctccttgcacccccacaggtttggcttgtggtttttgtcatcagtaacctactgcctgagatcatgatctcttaaaagatgagactctcggaagggttgattgtatgcgtcagtgagccttctatcaccttctggaacaaagtcacttgaaatctcttgatgagattaaggagtttagtgttactaagaaaatctgctttgggccgcagcagtgctgggtgttctcagacctgactgaggaagttagctgcgggctgccctgtgggctggtgcttcaggaggaatccagagaagtgttcagatgccccccttgggctcctttctaattttaatcagctctttaaatagctgcccatctcctgtgattgcacaaccaagcactttgacatttgcaccttaggagaggcagatgttaaaatggaatccaaagaccacctagggcggggctgggtgggagatgggagggccaactgcgagctgctccacttctcagctctcccctgccctgcagccctgggccagacaaggccagaaggtttcaggggcatttgacatcccctcctggttctcaccaggaaaacatccaaagctttggaggaaacaggccctgcccctggctccttaaatgccccgtctctttgtaaactgatattcagccagcaatgcctaagactttgttaagatcatttctactgcttttctttctgcttcaaacacacagttcgtctctgaggaaagtaaaataaatggaataagagtaaattgggtaaggagatatccaaagctacccagtcccttgacccagcacagttggccgacccgtgtcactccctggctgtcgctgcttctctgtgctcactgaagggtgagccaggccagtgcttccccagcccctgggcctggtcactacacagtggaaaacagacaagcggccccttccccaaatcccaagagtgtcttgctgcttggtgggtgctcatcgcaatgttctgaaggctccagggccactttgtttgtaagtatgatctgggcctcaaaataccatagtagctgcttgataaaattctaaaaatatctggttctctattatgtaaacactattacagtcaccagtgtgtgaagactcttgagtctggttctcatatcagagtcatcatttttcttcctgtggaataaaatgccttgtggacttcccaaacttgttcttttgttttcttctggtctcttggtgatccacagcttctagagctatcaccagtgacaaataccaaacatagtgtgatgttcacaataaaatgtggcctctgcccccaggcctggggaagcacccccacaccttaaccagtctcagcctcccaagagtaagtagtagtctccgcgctacactggctgctgatcagtccattctgaggttcctggtccaagccccagcaggacagacgtcacacttagggtttaggcagctgaagaagaaacagcaaaggaggccgggcatggtgactcatgcctgtaatcccagcactttgggaggctgaggcaggcggatcacaaggtcaggagattgagaccatcctggctaacatgatgaaacctcatctctaaccccgactatatcgcccctctctattccatccactccacctcaaaattaataaccttgtgtgtcgcccaaattttcaccacgttatataattatgtgtataactaaaactacaaaaaattagctgggcatggtggtgggcgcctgtagtcccagctacttgggaggctgaggcaggagaatcacttgaacccgggaggcggaggttgcagtgagccgagatcacaccgctgcactccagcctggcacaacagcctggcaactctgtctcaacaacaacaacaacaacaacaaaacagcaaaggaggctcagcaggatcatccagagatggagtgacaccaggagggtatggatcctagaagctgaggccagaaaggtttcaaagactaccgagggctgctactaagtcaggtgggattcggaccaacaattatcagtggacctagcaatgctgaagtcactagagacctttctaagagctgtttcaatggagcattggaggtgaaagccgggttggagtagattcaagaggaaaatggaaggagagaaataacaacagctctctacaggaatctggccataaatggagagaactgaccggaaattcaagagggcagggaaggaataagggagaagagggcctggcgggccaggaagatgggtggaggtgggggagcttgagattccattgattgctcctgatttctcacatcaggcaagaatgaatacagggcgggaagtgatgctgatttggagagagagaaggtgcacgtagtcatgtagggtaacgggaaagggaataggccacagaagcatggtatgtttgccgggcgacattaaggacccatttgacgttgatgaccgtgaatgtacagtggaatcgggcagcctggctgtattcttgtccggccacatgtagctgcacagcttcagtgttgtagaacaggcaaagaactggctttaatcaagaaatgttcccctcacctattcaagtacctcatccaccattgcccagttgaactggccaagagccaatcagaacaaaatgtcaacagaaatccaaaagcctagagaagggaggggctacgctttccaaaccaaagcacagcttctgaagactatgccccttccaagtgggagagacagtggaaggtgtggttaacaacccccacacgcgcacacaattagactcttttcaggggttcacagatgcagtgggacagtcagtgtttgacagtgaaccagccaggcactccagggcatggggatgtcattgacatagaaagggtatgtgtatgacgatcttccatttcctcagccgaattcagcaagccgtcttgcaggtattggttggctgcaaacacagctttcaccccagctctttagaccaagaatgtgatttctagcaccgtaagagatacttgatgtttgctgttcactggacactgcatcccaagaccctaataacagaaagtgcttcctgaaaacacacccaagcatgttcattattatttagaagtttggattaacctggaagagcacttcttcaggaaattggaagtgagattgcactcgcatctgcaagggtcttgaagatcatccaagttgtggctctctggctgagggcatgataaaagcaatcataaagaccaaagaaagggactgtaaacctagcgctttaggaagccaagccaggaggatcaagaccagcctgggcaacagagggagac

SEQ ID NO: 965 - DNA, 4802 bp, Homo sapiens
agtttgctggaacattatcagatggcttacggaagacgatggacaatcggcatcagtcagagcgggagtacatcaggtaccatgcagccacaagtggtgaacaccttgtagccggcatccatggcctggctcatggtaagtcatgggtgacatcaggctctgctgctgctggtcctcagaggcgcctttgtatcaatctgattgcagctataaaaaaagaaaggtgggctgggcgcggtggctcatgcttgtaatcccagcattttgggaggcctaggagagtggatcatgaggtcaggagtttgagaccagcctggccaacacagtgaaaccccgcctctactaagaatacaaaaattaggccaggcacagtggctcaatcctgtaatcccagcattttgggaggtcgaggcgggtggatcatttgaggtcaggagtttgagaccagtctggccaacatggtggaaccccatctctatcaaaaatacgaaaattagacaggcgtggtggtacatgcctgtagtcccagctactcgggaggctgaggcaggagaattgctcgaaccctggaggcagaggttgcaatgagctgagatcgtgccactgcactccagcctggcaacagagcaagactccaattcaaaaaaaaaaaaaaaaaaaaaaagaaaaggctgacaacagaggaaatcctgtgttggcgtacctgatagccttccaagctctcttactttatcctccttgcagttgaaatacgacagccggtgagaactcctcattcgctttctgaatgttgtgcacattgcaattccttttcgttctctggcttctgttcccaaagtatcataaggtgtaatcaaccagacctgttcttagaattgtagctgctacttctcttagaattgtaacctctgccttctccttactgatcattccttccaaagaaatggaaatgaggaatttgtggccaggtttgtagcccaggtgttttttagttttacataaatgtgcattcactaaaattataaatttatttgcctaagagatgttggtgatggcatgaatgcatttggtctctgactttgaattcttttaatgctttaattctgagtcatttgccttttgttgcatttttcttaacaatttcttagtacggcatccaaggcccttggaactataaatccagccaattttccaaccaccatccttcagccatgctgcactttggccacacacagctatgtactgcttcccaggtgtgcttccaagtccttgctcacacatggtccttctgctctccctcctctgcctcatttccttgtctatcaaaatcctactcagcctgtaagtcccaactcaatacattttcccagctctattgtccctgttagagttaatgacagagcacagtctgggttgtgtatgtcaccagctgtgtacatctgatagattgagaatgtgaggaggggagaaggaccactttgcattcacctttctccttgtgtacctcacatgacacctggcacatagctcatgcatagtaaggcttagtaaattaaactctttgtaccagatccttaggaaccatccaaagctatcagagtcatatcaaacctgatcagttttaattatctgcatttgaaaaagatgaaggaatatagacagtgcaatattatatttctatttgtgcttagggcacgtttagatagaagtttttgttgatcagctttcctaatggtgagatttggatcaaaatgcgtttgcttttcgtaaggctgcccatccgtaaagggagctgtccctaaggagacgtcaggccagaagtgaaatttggctgaaagtgatttgtttatggattttaaaagttgactgttgggcaatcatttggggttaaggtttaatcattctttctcgtaatggtaatgacagtacattggtctcttagaagacttttaaaatgaatataaaatgctttgttatgtgtggtggcctttatctggccagcatccttgtgacgtggagagagcatggctctcctcactttctggatgaacacacaaatgtgctgagaaaatgcatgattggttcaaagttgcaaaatcacctcccatcaagaatcattcctataatatgtacagcctctccaggagccaatggcttcatccaaagaggatccactgagctctgggttatacgaaggcagtatcctagagtgagagtcttcccttaggatgaaaagacctttagaaggtgataagaaccagaatccactcaatccccttgatgtaagaaatgggaattgtgctcagttctctctgcaggccttgctggacccaggttcagtcatgttctgtctctcaggtcccagtctgaattcctgttctgtgtgtgctctgccaaaaactttgttcaaaagtttgggaaagggctgggtgcagtggctcaggacagtaagcccagcactttggaagacctagagggagaatcgcttgagcccaggagtttaaggctgcagcaagcggtaatcatgccactgcactcctgcctgggtgatagacggacaccctgtttctaaaaaaaaaaaaagtttgggaaagagatattgcctcactggagcaaatttacccagaatccaaaagaaatgttgtgaattgttagtacattctcacccaaggagtttcctttaccaatttgtctcactagagctgaagagtctagagagcttcctcacaccccactgtcagagggtaaacatcctgtgagtgtccctggcacaggtcctggagatgctccctagacgggctgcctcttcccttcagtgactgtgacctcttcagcctctgccagcttctggcctcttctaaggtgttttcagccattgctgtcaacttgcaaaatgtttggaatgcctttttgacctggattggtcttttgaactgactccattgagggtcccagccagctttcacagctttttggggtgctcttcatgaaggttttatataatcgccgataccgaatttcatcaaagcatgcagtagcttttaccttatttcaagcatccagtggggttggccagtcacccccatagtgttctttgaaaattgcaaatgtataccatcagctctccatatccacagattcagccaaccatggatggaaaatatttggggggaaaaaagatttcacgaagtgccagaaagcaaaatttgaatttgccacacgtttcaaatactgtattgactccacacaaatgaagtgatatgtgggcatcgtattagctacaataaataatctagaggtgatttaacgtatacaggacggtgtgtgtaggttatatgcaaacacctacagcacattatgtaagggacttgagcatcctaggattttggtatctgcaggggatcctggatcaatcccacatggatactaaggaacaactacatttagttatctctctctgccttagatatctttcttttcttttctttttttttttttttttgagacagtctcgctcggtcgccagactggagtgcaatgctgcgatctcggctcactgcaacctctgtctcctgggttcaagcaattctcctgccttagcctcccgagtagctgggactacaggcacgcatcaccacgcccagctaatttttgtatttttagtaaagatggggtttcaccatgttggccaggatggtctcgatctcttgacctcgtgatctgcccgccgcagcctcccaaagtgctgggattatgggcgtgagccactgcgcccagcctctgccttatatttcataggatgccatcatcttcaaactttccccgaaggcccaattttctagtctcctgttgatttaatcctctatctgtatcctctcctgatcgtccgtaggctgcccaagctctgggatcgaaaaattggccactgttaacctctcagcttttctctgatttttttttttttttttttttgaactggagcacactttacttctgactaacatgtaacatatatcctctgactctggacttaatgggcaaatctgcaggatcctcttctgtgagttggcctgtctgtggcctctctggcacagagattaatagaatggccttaagttatcattccataatcaaggggtttggctttaaatgcttttgcttttgtcctcgtcaggttacaacagcccttgtctttttcactaggtatcattggtggactgaccagtgttataacttcgacagtggaaggtgtgaaaacagaagggggtgtcagcggtttcatatctggccttggaaaagggcttgttggcactgtaaccaagccagtggcaggcgccctggattttgcatcagaaacagcccaggcggtgagagacacagccacactcagcggccccaggtcagtggtgtgggaagaatggcttttgcagtttccagcctaggtctgctgcttctcctaatccatactgatgtgtttaattgtgcactttcttagttatagggtttttaattcaaatacttgtaactgaaatttctgatctgcctaatataaaaagatgaaaatgaggtacagaaacctggcatgaattttttcagataaatatatatatagcatattttatatatgctatatattttatatatgtatgtatatatagcatattatatataagtatgtataactatattatgttatttttctccattagagaggtcagaattaggattaaactgttagaagcttcttctgttcaccaagccaactggatccccacatgcctatgaagaaaactgtcagattg

SEQ ID NO: 966 - DNA, 274 bp, Homo sapiens
ttttttttgagatggagtctcgctctgtcacccaggctggagtgcagtggcgcgatgtcggctcactgcaagctcagcctcccgggttcaggccgttctcctgcctcagcctcctgagtagctgggactacaggtacctgcaaccacgcccggccaattttttgtatttttagtagagacggggtttcactacgttagccaggatggtctcaatctcctgacctcgtgatccgcccgcctcagcctcccaaagtgctgggattacaggcgtgag

SEQ ID NO: 967 - DNA, 425 bp, Homo sapiens
tccccactgttgttgttcaccatgtgggtctgttccttcttaattttccttccgcttgaaagtatcagccccaaccccataaagaaaagtgccaccccccatccccccagcaggtcagcagttctgctgtgggattgctgtctggccttgataccagctgagactggaaatcagggacagcccatatggttccaaaccccacagaacccaactgctttaacgtagctgtttgcttgaatggcctattttagcctcccttttccagagtgactaattggggattcttatcaacaaagggtataatgaatgttaagggcccagccaagctagactcgacttaagcccagaaggattttgctgctgcttggataatagattttccctgagtgaattagtacgcccttttagaatgcctagggcctggc

SEQ ID NO: 968 - DNA, 16037 bp, Homo sapiens
cgcggcgagcgcagcagcagggccgggtcctgcgcctcgggggtcggcgtccaggctcggagcgcggcacggagacggcggcagcgctggactaggtggcaggtgagggcgtccccgcgcacggctggggtaggggacgggagtggcgagcttcaggtccaccggctgccaccgagtgatgggaccggaggacaggagaggtcgctcagccaagagccccggggaggcggtgccttctcggtggggtcagcaacggtctctggggggtgcctgggagcggcagccggtctccgccttggcggcccacagccaccgcggacgcctccctcccggatgtctcctcgctgcccttccctggccgaagccctcccctgcagcctcctccccacctgccggccctgtgttctcactgctcttctctgctctgggatccgcaggatgacgtctgtcctgcttcttcactgtcctttacagtcaccagtctcggccgggcgcagtggctcacgcctgtaatcccagcactttgggaggccaaggcggtcggatccttggagatcaggagttcgagaccagtctggcaaacgtggtgaaaaccggtctctactaaaaatacagaaattagccgggcatggtggcccacgcctgtaataatgtcagctatgtgctgaggcaggaaaatcacttcaactcgggaggcagaggttgcagtgagctgggattgcgccactgcactccagcctggcagacagagtgagacttcgtctcaaaacaaaaaaaagaaaaacacaaaaaaaccaccaccaacaacaacaaaaaaataaagccaccagtctcggagtttcaaatctgagcactcttatccatcttaattctttcaataattcagctaaacgaatggggtcctgagaatctgcagagccaggctcagcgctcgcctgcagagcctgcggtctgtggggaccaccagcaagatgaggaatcaccttcgggaggaagggtcgtgctggggagggtcgcgccggcggggtcaagagaacctcctccagggtgggaatcagagcctccgggccgcggtgtttgagggtgagtggaattaatgccgtgatggacatggggccttctaagggggaccaacagtgtttgtgaagagttgactttgggaggggttcaggatggccagaggtggaggctgtgacctcagtgagtctggatcaagggagggggcaggtgggtaagacaccgttttaacaaggtggctttgagcggccacctttgaggggcctaagggcccctgggagatttaggaggaaggacaagaggattaagacaccgctttctgaggtgccgtgtggctgtggcgtgggggtggctgggggagtgggttgtgttcattgtccaaggctctccagcgctttgcgtggcgttttggggagcacagatgaggtgtcccgacagtggggagtggctctagggagaccagaggctcgggagggggcctgggcattagaccaggcacagaatccgaagtgggaagaaatgtgggcgtagagggcaggccttggggatgggtgtgggggaggagggggagatggaaaggagtcagggaggtctcccaggctcacctggaggagtcagggtctcatttccaagtgcactgggaactgcagcctgggggtgggggttcatttggtttcaggcctgtggccaagagacccaccccctcacattcacactttggtctccagtggcttcacaggcaccacctccttgttctcgcctgttttactcctcaccttgggctgtttcttgcctttccattctggcgttctgcagggatcagatccttcctctcacgcacaatctacactcatggcttttgctgggagtaatgagtaaagctcccaaatagatgtttctgagttaggaagcacattaaaaacaaaacaaaacgaagcaaaaccacacaattgtccaagtcccactctgtgttcaagggtcacatgatgtgcagaagctggtgatgggcaggagctctgaatggagttactgggatgtcaggccgcgtgggcctggggcaggctggctgactgggagcagcctggctccaccccggctgtccaggacgcactcacttgcctctatggatgacagctccttgcctcacagctgtctgtctctgggtcagattcagcatctcagtgtcttttgtgtatcagctgaatgtcagggaggccacaggctggtgcccagttgaaaatctcacaaggactctttgtaaatgcatgcaagaataagaacagcattttcctcctcctccctgaccccattctcctcctcagatgggacgatctggtccttacggaaagaattggagttcactgcttccagctctgtgtgtgtgtgtgtgtgtgtgtgtgagagagcgagctctgcaggcgagccagttctgttgctattgctggtttgagctgctgccatcaccacacttagctaattaccttaacatttgcacttaatttttggccggagactaacagaaaataaatttttctccaatttaaaatacttacgaactttaagaagaaaacaaaaagtacgattccaaaattgccctgtagtaagtaggtcagtaacattcagggagtgtggaaactgcatttctctttattcttcccttccaggccctgcatcatggaaactctttctaatgcaagtggtacttttgccatacgccttttaaagatactgtgtcaagataacccttcgcacaacgtgttctgttctcctgtgagcatctcctctgccctggccatggttctcctaggggcaaagggaaacaccgcaacccagatggcccaggtaagcttgcccgtccgccaggagcagggactggcctgggctgcgtgttctgtcaccagcttcacactcacactccagagccactgagaaaggagggcaggactggggcccgagtgtgcactggccgtttcagggaggcggggtccactggggaagaagtggggcagggcagggaggcaggaactctgctccaccgagatttatttgggggaaactttcctcggttaatcccttggaaaagaccatccaagctgtcttgtcctagcgcagaatctttctttagaaaatgacactgaaattatttgaaacataagttgcaaagaactacctcttttttggagcaagagactttgtaactaaactttcattggtaaggaaggttaatacctgtttcaagttgtttctgtaccaacagctcagggagggcatcaacagaaatttgcaagaaggattccagggcaagtgcttcattacagctgcacactgtgcaggtactgctcagctcagtctcaccaacattcagagaacctgtggaaatgattcaagatcagtgcttgtccccagacctttgtggaaaggagaggagacatacacgtgagatgaaaccgaaaagcgccatccctgagtgcaggccgctggacacgccttcatcatgggagttgtcctttgttcaatatgactgtctttttctttgatgacgcttttcaatagtgaattactcattttaataatttcccagctcattgtgtgaagaagggagggtttatgtgtaaaggctaccagccttaataataagcacagagaggctctctaaaagatatatatatttggaaatagggcattgcaatgaaaatacgcatgccatggcaagctatgtgcacattcagggaggtgaaataacactaagatttttaaaggaaaaagtaaagaggattacataattcctttgaaataattatttttggcaaaaagatcaataacgaaggtgatgtcagtgtgaggttggatggggagttcctgggtagatgtccttgcacaagtattttgttgtgtaaggctgtgatggcctttgtgcaagagcgtaggtttttagagtcctttgtgatagttgtgttatcaggcattcaagcgtgagaaccctctcttcatggccttccctgtctgtttgtcaaaggtttttggttttgtttttttaatattagtgactccattttgattctgaagttccttatgctgaaatctgtatgatctttttctatgttttaggctcactgataaacccttatagaaagcttttttgagagcaccaaaattgtctgggtaccttcttaggtgtgagactgagctctctccatggctccagtgttcaactggatgcttgtgagacaccaaacatactgagtacacgttgctacctgtaacatgcagggaagcgttaatggcagcagaaatattttaaagaattatttatttttccttcattatataactggtaaaagtccactataaaaatttttaaaaaataaaagtagaagggaggaaaaaatccctatgaatccatcaaacagagacaaccacccttgataatgtaaagcatcttcctccagtcctatttctttttttttttttcgagacagagtcttgctctgtcgcccaggctggagtgcagtggtgcgatctcagcttactgcaagctccaccccccgagttcacaccattcttccacctcagcctcccgagtagctgggactacaggtgcccgcccccacgcccagctaatttttatttttagtagagacagggtttcactgtgttagtcaggatggtctcgatcacctgacctcgtgatccacccgccttggcctcccaaagtgctgggattacaggcgtgagccactgcgcccggccctatttcctgattttcacttgacattttgtactttggtgattatatggtatctttacttttataaatgatttttcagctaatgtgaggattcggtgagacagtccatgtaaagcaagtgctcaacatgtgttggctatgaatagtaatagtggtgtcacagcctcaggtgaaattggtcttagcttttggttctgttctatttgacagggtttctcatcaacagtctatgagctgtctaaagtaaatttagtagcttcctcttttttctatgttatagaacagtgtgtattgcatgagaaatagaaattgcttgaatattagaaaaaaaaatccctcaaaagatcatctaagcctttttagaagtaattctctctctccctcttattttttttttgttcattcattgtgactgatagattctgttttttgtttgttttgtttgttttgttttgttttttgagatagagtctctgctctgtcacccaggctggagtgcagtggtgctatctcagctcactacgacctccaactcccgagttcaagttcacgtgattctcctgcctcagcctcccgagtagctgggattacaggcacatgtcaccatgcctggctagtattcatatttttgactggcatttggtaacttataatctgtactttactgaaaataattatatagagtttttgttttaacattccctttgtttatattgctgtaacctctttttcacatataactttactttggggtgctttttcttacatgtggtgggtggctgtctgttttgtatgtatgtgtgttttcttttaaagaaccagctcttggattcattgatcattttgtgtttgtcccaaaattccttgggagtttttctgtatcttttctaacataatgattttaaagttttagcattttattactttcttggtaatattgaaaacaatgctatgttttaacttatctttggccaaactctttggtctaatatatatcacccatattttgattattttctaaatcatatgtcatatacttatttagaagaatttgtttgtttgtttgttttttgagaaggagtcttgctctgttgcccaggctggagtgcagtggtatgaccttggctcactgcaacttccgcctcctgggttcaagtgattctcctgcctcagcctcccaagtagctgggattaccagcaagcatcaccacacccggctaattttcgtatttttagtagagacaggatttcgccatcttggccaggctggtcttgaactcctgacctcaagtgatctgcccgcctcggccccccaaagtgctgggattacaggcatgagccactgtgcccagcctagaagaatattttaaatatttgtttagaagaggattttttgtgttttttttttttttttgacatggtcttgctctgtctcctaggctggagtgcagcagcttgatcatagctcactgcagcctcaaagtcctgggctccagcaatcctcccatctcagccttccaagtagctgggaccacaggcacacaccatcatgcccagctaagtggagatgggatcttgcaatgttgcccaggctagcctcaaactcttgggctcaaacaatcctcctgccttggcctccaaaagtgctgggattataggcatgagccactgtgcctggcctagaaaagtattttaatttttactttgaagagttaattatttagaaaagtgttttcagtaatattttgtaggtgattttcattttgttggcattttatttataatgctgattttttgttactacattgaagttagagaatatgatctatataattctgtatttcagaatgtattgggatgttgagacttttcttatggcccaatatgtgtgatatattttgaaatatttaatatacacacatgtagtccctatagggtacaattttaataactgtgttattgtcttattaatcacattgctcatgtaatatccttgtttccttttgaggattctgatgattgtatttccgtctatttttccatgcattttttctgcttttaactttttaactgcatctttttttttcactataaattttagaggtaattttcccaccacttagggtacatttatattttccttttgatgcaagattttatcacaacctcttttctgagcttttctcacccttgtcattttttgtgtgttactgatctttaaacaagcgagatccattcaggcagaatggctacatcttttactcgcctgttttctgtcccctctctctcctctccccagccatcaaagagctatcttgataacttttaaaattatctttcacaacaggcactgtctttaaacacagaggaagacattcatcgggctttccagtcgcttctcactgaagtgaacaaggctggcacacagtacctgctgagaacggccaacaggctctttggagagaaaacttgtcagttcctctcagtaagttgaatcaatagaacaataaaagttgcattcaacatacctggtgatatagagtctgggagaaagaccctagagaaattgagaaatttatgttaaccaatttaaaaaaattgcactatttttttttctaagatggggtctcactacgttgcccaggctggtcttaaactcctggtctcaagtgatcctcctgcctgttgggattacagatgtgagccaccacgcccagcctaaacttctttttttttttaaagactgcaattctataattataccttgcattagtattgcaaaagtagtctctacttttcttgaaaggtaaaattgaaaggtaaaattctcaagttcatttctggttattcagggttcaatacatacctattcacaaactctgatattttaacatatcttcatatgatcacttttaaagagttatgtatattctttttattaaaaaaagataacatatttagaatttttggaagtttgctgacatttgtatttagcaatgcagcctcactgaacatttttctctccaaagacgtttaaggaatcctgtcttcaattctaccatgctgagctgaaggagctttcctttatcagagctgcagaagagtccaggaaacacatcaacacctgggtctcaaaaaagaccgaaggtcagaatgacaagttattgcaccttcctcccaacccgtcctcctcctgcggctcttcctattcctccttcccgcctcttatatcctctctcctcctcctctccctcctatccctcctccctctcctcacccacctccacctttccactccgccccctctaatttcacgggtgtttcagatggtcagagtagtgttgactggcagggcctcctggcatactgaaccttgatggactcataaaggttctgatcagacattcaggttttcagcaacagagatttacttttgtctattctcccaggaccagagtagctgatacaaatgtcaaaagagggccagccacggtggctctcgcctgtaatcccagcaatttataaggccgaagtggacatatcacttgaggtcaggagttcgagaccagcatgaccaacatgggtggacccccccccgcccaacatatttactaaaaatacaaaaattagccaggtgtggtggcccatgcctgtaatcccagctgcttgggaggctgagacatgagaatcacttgaacctgggaggcagaagttgtagtgagctgagatcatgccactgaactccagcctgtctcaaaaacaaaaaccaaacaaaaaacacaaatgtcaaaagaatctcaggccaggtttccagtttaataacttgcattaaaatatactctccctggcctgtaacattcacatgtcaggtgactccattgtctctgcgagaaggagattggtggacagatcttgcctgaggtatacacttgggctgcctcttcctaggttctgggggacctccatcaccattacctttacctgctaaggtcactcctgacttttcatgtcttccacttaagctcctttagtttgacttgataagcctacatttgattggttaactgccgaccctctctcagggctgatcagttccacagactgaaaataccctccatttggggttgaaccttattcatctacatttcagaaagtgacgtgttccagtctaggcctccaagaccaatgatggtctgatgaaccattcagactcctctgcgccaattatgcttagtaccaccaggaacatttccatttctgtgaataaatgagacggtaaagaatgggagacgttcttcgcttaaagtctcagcagttgtttcccgcattcctgcttggagtatttaccacggatgctctcttcaggcagtgggttagcagggatgccctcagttcattgaaacagtaccacttgatctccagggaaagaaggggtgatctttgtttgcccacatcctcttttccagggatgcctagtgctttgttgaggggattcagcaggaatatctcctccaaaagcttctggaaactccccatgtgcccaatgtcagctcttcccgctttgagccgtccattctggttgcttctgacatgtccatgtatagtcacagaatgttagaactgggtgtgatcatgaagggttggatcaaacactccaattaaccatgtgagacaaacaccccttcagcctatcacatttcctgctggtcttgttctccaacctggtgtaatttttctactttgtaccaacctgctttcctcgagtgacttaggtatctttcaccatcctcaacttggtggatgttctcaaggtgtcagtaatcatgaataccactcatatgtgctgtttttatttctctacataacaacccaaactcagcaaagttgaaaacagaagtttgcttctcaactaatgatccaggatcatccaatgcatcaggttcttataaaaagcaactgaatgtagtctctacttttcttgaaaggtaaaattgaagagttgttgccgggtagctcaattgatgcagaaaccaggctggttcttgtcaatgccatctacttcaaaggaaagtggaatgaaccgtttgacgaaacatacacaagggaaatgccctttaaaataaaccaggtgggggaagctttttaaaatcctgctagtttgatgaagaagttgaatggaaagatttaactttgtaaaagtgtaagtgacataagcgtaagccaaaaggaatttgaaacttaaagtatttctgaatgaatttcttaactcagtagaaaaaaacggaaggagtaaaagatatttgctgcatatatatattatatatacgtatatataatatatatatatatatgtagtgttttatcactgctcttaactgcctttgataatttctcataaaccattgctgccacctagttttggaaactaaagatcttcctataagcccaatttacttggctagaaagcaaaaaaaaaaaaaaaaaagtgttaaggtagtgtgatatgtgggagtgagaggcagtatagggcagggtagagggagagaaggtgaaaacatgtgtctttaattagttatttttaaaattaaagtaagttttatttgaattgttaactaattatcattaattcagtattacaggcttttaatattaaaacttcatgacaaagaccttagttttgacattgaagtaaaacttaattaaggcaggcattagaataatttgccaaatcttccagcccctaaaaagatactattttaatgtaattaaaaaacaaaagcaggtaaccctcctgcattttttgtaaggtgtactttaacttaaaaaaattagttctctagttgcaaagggtgggaggaggagaattctaaccctggttttagaactattttaatttttataataaatgatctgtatcaattttttaaagtattacgttaataaatgtaatactttgctgagcttctatgtgcttatgcctcttctgtattttaaaaaagttatttcattagagtatcagaattgaaaagattgggttaaaatacattactacatatgtaggtcgttactctttctgagagagtgtatccatttatactccctgtcatgctgttgtggaactataagtttcatcccactttatgattttttttctcatatgttgggttggataaataggaaaaacaatacacatttttttctaattaaatcaaaacaaatttgtatttaatttcatttgattatattgctttcttagatctatttgctgagcacaatttaaatgagaaacatctttctcctctggaaaatgtagggtatcacattttattttgcagaagaaaacctttcccagggtggtactgtgtctgcttgcaatgaagataggaaggaactggttgactttttttttttttttttttttttttttttttagtgttaactggggcatgaatgtggcggtttccatcacaggtgctgaaaacactcttggaggcaactgcagctcttttgaaagttttaattgcgtctttcaataatccttcccccaggaggagcaaaggccagtgcagatgatgtatcaggaggccacgtttaagctcgcccacgtgggcgaggtgcgcgcgcagctgctggagctgccctacgccaggaaggagctgagcctgctggtgctgctgcctgacgacggcgtggagctcagcacggtaagacccgggctgcgggaagaacccagggacacctttgcgggcagaactcgagtgccacttccacctctcatattcaccttctgagttggcgatgcggcagacgcacactgtgcaggcacttggcgttgggatcgaacttttgttcaaggctgacttttcccaatattgtctgcgtgatctgccaaactacacatctcagtcctctgttttttcatcgctagaaggagtgggcggcggttaaaatgccttttaaaataaatcaggtaggaggaagcttataaaaatcctgctagtttgatgaatggcagacttttaactctaaaagcataaatgactgctcggggttattgcctcctagagttatgatgaggataaaatgtgggtaattcaggtaacaagcttaccacattgcctggcaactagtaaatgctctacaaatgtgatccattattacaatcatcattcttagcattatgcttttaaagtctaggaacctgaaatagagaatgaggaagtcttaactttgacctaacaaggctgggagggggcatccagggaggtgtgaagtccagttctcagagggtgggaccagaggcagcctctgagggcacatccaggcactcggcttcctttcagcatggatctccagggtgagagagtcaaccatggcaaatggcaggcagtgggaccccatgacttaagaggtctgtgtgcgcagcagccattggctctccctctgcccaccttcctgaaactatgctccggaaactatgcagaatctctctggggcagataatcctctggtaacctctctgctccggaaactatgcagaatctcacctgggacagataatcctgttggagtggctcacactgagagccctttcgtttccaatccttttctttactagcaatggtttgttgtctttaaaaagactatgtttgaaaaaaaaacacagtcgcctgggcattgacacttgtcacaatacaagatgtctctggagttgttggataaggagaggacagccacagccttcctgcctctgactgcttggtgtctctcccccttgtcaaggaagtggcacatgggacataggacaagtaagagtgctcacaagcttctggcagatgaaggggccactgatcctatgtgaacaaacaacacctacgtgcaaggggaggaagggaactgtgagtgcctgtgcgcttgtacatgtgcactgaagtcggaatcttaaagtctaattctggtctttcaggtggaaaaaagtctcacttttgagaaactcacagcctggaccaagccagactgtatgaagagtactgaggttgaagttctccttccaaaatttaaactacaagaggattatgacatggaatctgtgcttcggcatttgggaattgttgatgccttccaacagggcaaggctgacttgtcggcaatgtcagcggagagagacctgtgtctgtccaagttcgtgcacaagagttttgtggaggtgaatgaagaaggcaccgaggcagcggcagcgtcgagctgctttgtagttgcagagtgctgcatggaatctggccccaggttctgtgctgaccaccctttccttttcttcatcaggcacaacagagccaacagcattctgttctgtggcaggttctcatcgccataaagggtgcacttaccgtgcactcggccatttccctcttcctgtgtccccagatccccactacagctccaagaggatgggcctagaaagccaagtgcaaagatgagggcagattctttacctgtctgccctcatgatttgccagcatgaattcatgatgctccacactcgcttatgctacttaatcagaatcttgagaaaatagaccataatgattccctgttgtattaaaattgcagtccaaatcccataggatggcaagcaaagttcttctagaattccacatgcaattcactctggcgaccctgtgctttcctgacactgcgaatacattccttaacccgctgcctcagtggtaataaatggtgctagatattgctactattttatagatttcctggtgcttagccttataaaaaaggttgtaaaatgtacatttatattttatcttttttttttttttttttctgagacgcagtctggctctctgtcgcccaggctggagtgcagtggctcgatctcggctcactgcaagctccgcctcccgggttcacgccattctcctgcctcagcctcccgagtagctgggactacaggcgcccgccaccacgcccggctaattttttgtatttttagtagagacggggtttcaccgtgttagccaggatggtgtcgatctcctgacctcgtgatccacccgcctcggcctcccaaagtgctgggattacaggcttgagccaccgcgcccggctatattttatcttttatctttttctttgacatttaccaatcaccaagcatgcaccaaacactgctttaggcactggggacacaaaggggacagagccatcctcctttgacacctggtcttcagttctgtgcccaacgtatatagttttgacaatgaccaggttggactgtttaatgtctttcaacttaccacgtaatcctcttgtagggatcacatctttctttatgatattgtatttctctacctctaacagtaaaaattccattcaacccttaaagctcacttcaaattcttctttgagaagtttttcctttctccgcaaccagatgtacatatttgaactctctttgtacttggagggcacttctttcgtggtagttcttttatttttattaatctctgtatccttagatagtcctccaacaaccaaaggttgggactctgtcttacatatctgggtgcccctcatagtgcagtaataagtaagttgattatatacgagctatgtaacttatattttttaatggttggatatcactgagtttttttttttaagaatttttttattgaggtaaacttcacataacataaaattaactattttaaagtgagaagttcagtgccacttagtattgttaacaatgttgcataaccaccacctttatttaaagttccaaaaaaaatgttctcctctaaaaggaaaccccatcccattaagcagatactctccattccttccttcctccagcccccagcaaccaccaatctgctttctgtctctatggatttatctattcttgctattttatataaattgaattgtatgagaccttttgtgtctggcttctttcacttagtacaagtttttgagatttatttacatagtagcatgtatcaacacttcatttttatggccaaataaaattgtattatgtgtttatagcacaatttatttatccactcattcattgatggactttgggttgtttctgacttttggctattgggaatagtgctgctatgaatgtttgtgtacctgtatttgtttgaatgcctattttgcattctcttgggtatatatctaggagtggaactgctgggtcatatgttaattctatgtttagctttttgaggaacagacaaactgttttccacagcagttgaaccattccacattcccaccagcaatgtatgagaattccaatttctgtccacttcctcaccaacacttattattttccttttcctttttttaaaaaaaataagttatggccatcttagtgggtgtgaagtggtatctcattgtgttttttatttgcatttcctatgtaatgagctagaaactaaagtacaaactagatgggacatccagtccctttgatagataatgctgagtaaaaaatgagatgaaagacatttgtttgtttttagaacacgagtgacagtttgttaaaaagctttagaggaggaatgaaaacaaagtgaagtacacttagaaaagggccaagtggacatcttggatgtcaagtgcctagttcagtatcttttttttttttttttttttttttgagacagtgcctcactctgtcacccaggctggagtgtagtggcatgatctgggctcactgcaacctcctcctcctggattcaagcaattctcttgcttcagcctcccaagtagctgagactacaagcacccaccatcacacccagctaattttgtatttttcagtagagacggggtttcgccacattggccgtgttggtcttgaactcctggcctcaagcgatccgcctacctcagcctcccaaagtgctaggattacaggcataagccactgagcccagccctagttcagtatcttttatgtaaattacaaacatctgcaacattatgtatcatatgcagatacttattgcatttcttttattagtggtgaaagtgttctatgcatttattggctcttgaatttcctcatctatgaattgtcattcatacacctacttttctgcttcgtttttacatatgtctttgcctattaaagatattatccctctgttttatattttctctcattcttgtattgccttttaaattttgttatgatgtttcattaataaacagtgttttgttttcctctataatcaaa

SEQ ID NO: 969 - DNA, 16107 bp, Homo sapiens
cgcggcgagcgcagcagcagggccgggtcctgcgcctcgggggtcggcgtccaggctcggagcgcggcacggagacggcggcagcgctggactaggtggcaggtgagggcgtccccgcgcacggctggggtaggggacgggagtggcgagcttcaggtccaccggctgccaccgagtgatgggaccggaggacaggagaggtcgctcagccaagagccccggggaggcggtgccttctcggtggggtcagcaacggtctctggggggtgcctgggagcggcagccggtctccgccttggcggcccacagccaccgcggacgcctccctcccggatgtctcctcgctgcccttccctggccgaagccctcccctgcagcctcctccccacctgccggccctgtgttctcactgctcttctctgctctgggatccgcaggatgacgtctgtcctgcttcttcactgtcctttacagtcaccagtctcggccgggcgcagtggctcacgcctgtaatcccagcactttgggaggccaaggcggtcggatccttggagatcaggagttcgagaccagtctggcaaacgtggtgaaaaccggtctctactaaaaatacagaaattagccgggcatggtggcccacgcctgtaataatgtcagctatgtgctgaggcaggaaaatcacttcaactcgggaggcagaggttgcagtgagctgggattgcgccactgcactccagcctggcagacagagtgagacttcgtctcaaaacaaaaaaaagaaaaacacaaaaaaaccaccaccaacaacaacaaaaaaataaagccaccagtctcggagtttcaaatctgagcactcttatccatcttaattctttcaataattcagctaaacgaatggggtcctgagaatctgcagagccaggctcagcgctcgcctgcagagcctgcggtctgtggggaccaccagcaagatgaggaatcaccttcgggaggaagggtcgtgctggggagggtcgcgccggcggggtcaagagaacctcctccagggtgggaatcagagcctccgggccgcggtgtttgagggtgagtggaattaatgccgtgatggacatggggccttctaagggggaccaacagtgtttgtgaagagttgactttgggaggggttcaggatggccagaggtggaggctgtgacctcagtgaggctggatcaagggagggggcaggtgggtaagacaccgttttaacaaggtggctttgagcggccacctttgaggggcctaagggcccctgggagatttaggaggaaggacaagaggattaagacaccgctttctgaggtgccgtgtggctgtggcgtgggggtggctgggggagtgggttgtgttcattgtccaaggctctccagcgctttgcgtggcgttttggggagcacagatgaggtgtcccgacagtggggagtggctctagggagaccagaggctcgggagggggcctgggcattagaccaggcacagaatccgaagtgggaagaaatgtgggcgtagagggcaggccttggggatgggtgtgggggaggagggggagatggaaaggagtcagggaggtctcccaggctcacctggaggagtcagggtctcatttccaagtgcactgggaactgcagcctgggggtgggggttcatttggtttcaggcctgtggccaagagacccaccccctcacattcacactttggtctccagtggcttcacaggcaccacctccttgttctcgcctgttttactcctcaccttgggctgtttcttgcctttccattctggcgttctgcagggatcagatccttcctctcacgcacaatctacactcatggcttttgctgggagtaatgagtaaagctcccaaatagatgtttctgagttaggaagcacattaaaaacaaaacaaaacgaagcaaaaccacacaattgtccaagtcccactctgtgttcaagggtcacatgatgtgcagaagctggtgatgggcaggagctctgaatggagttactgggatgtcaggccgcgtgggcctggggcaggctggctgactgggagcagcctggctccaccccggctgtccaggacgcactcacttgcctctatggatgacagctccttgcctcacagctgtctgtctctgggtcagattcagcatctcagtgtcttttgtgtatcagctgaatgtcagggaggccacaggctggtgcccagttgaaaatctcacaaggactctttgtaaatgcatgcaagaataagaacagcattttcctcctcctccctgaccccattctcctcctcagatgggacgatctggtccttacggaaagaattggagttcactgcttccagctctgtgtgtgtgtgtgtgtgtgtgtgtgtgtgtgtgtgtgtgtgtgagagagagcgagctctgcaggcgagccagttctgttgctattgctggtttgagctgctgccatcaccacacttagctaattaccttaacatttgcacttaatttttggccggagactaacagaaaataaatttttctccaatttaaaatacttacgaactttaagaagaaaacaaaaagtacgattccaaaattgccctgtagtaagtaggtcagtaacattcagggagtgtggaaactgcatttctctttattcttcccttccaggccctgcatcatggaaactctttctaatgcaagtggtacttttgccatacgccttttaaagatactgtgtcaagataacccttcgcacaacgtgttctgttctcctgtgagcatctcctctgccctggccatggttctcctaggggcaaagggaaacaccgcaacccagatggcccaggtaagcttgcccgtccgccaggagcagggactggcctgggctgcgtgttctgtcaccagcttcacactcacactccagagccactgagaaaggagggcaggactggggcccgagtgtgcactggccgtttcagggaggcggggtccactggggaagaagtggggcagggcagggaggcaggaactctgctccaccgagatttatttgggggaaactttcctcggttaatcccttggaaaagaccatccaagctgtcttgtcctagcgcagaatctttctttagaaaatgacactgaaattatttgaaacataagttgcaaagaactacctcttttttggagcaagagactttgtaactaaactttcattggtaaggaaggttaatacctgtttcaagttgtttctgtaccaacagctcagggagggcatcaacagaaatttgcaagaaggattccagggcaagtgcttcattacagctgcacactgtgcaggtactgctcagctcagtctcaccaacattcagagaacctgtggaaatgattcaagatcagtgcttgtccccagacctttgtggaaaggagaggagacatacacgtgagatgaaaccgaaaagcgccatccctgagtgcaggccgctggacacgccttcatcatgggagttgtcctttgttcaatatgactgtctttttctttgatgacgcttttcaatagtgaattactcattttaataatttcccagctcattgtgtgaagaagggagggtttatgtgtaaaggctaccagccttaataataagcacagagaggctctctaaaagatatatatatttggaaatagggcattgcaatgaaaatacgcatgccatggcaagctatgtgcacattcagggaggtgaaataacactaagatttttaaaggaaaaagtaaagaggattacataattcctttgaaataattatttttggcaaaaagatcaataacgaaggtgatgtcagtgtgaggttggatggggagttcctgggtagatgtccttgcacaagtattttgttgtgtaaggctgtgatggcctttgtgcaagagcgtaggtttttagagtcctttgtgatagttgtgttatcaggcattcaagcgtgagaaccctctcttcatggccttccctgtctgtttgtcaaaggtttttggttttgtttttttaatattagtgactccattttgattctgaagttccttatgctgaaatctgtatgatctttttctatgttttaggctcactgataaacccttatagaaagcttttttgagagcaccaaaattgtctgggtaccttcttaggtgtgagactgagctctctccatggctccagtgttcaactggatgcttgtgagacaccaaacatactgagtacacgttgctacctgtaacatgcagggaagcgttaatggcagcagaaatattttaaagaattatttatttttccttcattatataactggtaaaagtccactataaaaatttttaaaaaataaaagtagaagggaggaaaaaatccctatgaatccatcaaacagagacaaccacccttgataatgtaaagcatcttcctccagtcctatttctttttttttttttcgagacagagtcttgctctgtcgcccaggctggagtgcagtggtgcgatctcagcttactgcaagctccaccccccgagttcacaccattcttccacctcagcctcccgagtagctgggactacaggtgcccgcccccacgcccagctaatttttatttttagtagagacagggtttcactgtgttagtcaggatggtctcgatcacctgacctcgtgatccacccgccttggcctcccaaagtgctgggattacaggcgtgagccactgcgcccggccctatttcctgattttcacttgacattttgtactttggtgattatatggtatctttacttttataaatgatttttcagctaatgtgaggattcggtgagacagtccatgtaaagcaagtgctcaacatgtgttggctatgaatagtaatagtggtgtcacagcctcaggtgaaactggtcttagcttttggttctgttctatttgacagggtttctcatcaacagtctatgagctgtctaaagtaaatttagtagcttcctcttttttctatgttatagaacagtgtgtattgcatgagaaatagaaattgcttgaatattagaaaaaaaaatccctcaaaagatcatctaagcctttttagaagtaattctctctctccctcttattttttttttgttcattcattgtgactgatagattctgttttttgtttgttttgtttgttttgttttgttttttgagatagagtatctgctctgtcacccaggctggagtgcagtggtgctatctcagctcactacgacctccaactcccgagttcaagttcacgtgattctcctgcctcagcctcccgagtagctgggattacaggcacatgtcaccatgcctggctagtattcatatttttgactggcatttggtaacttataatctgtactttactgaaaataattatatagagtttttgttttaacattccctttgtttatattgctgtaacctctttttcacatataactttactttggggtgctttttcttacatgtggtgggtggctgtctgttttgtatgtatgtgtgttttcttttaaagaaccagctcttggattcattgatcattttgtgtttgtcccaaaattccttgggagtttttctgtatcttttctaacataatgattttaaagttttagcattttattactttcttggtaatattgaaaacaatgctatgttttaacttatctttggccaaactctttggtctaatatatatcacccatattttgattattttctaaatcatatgtcatatacttatttagaagaatttgtttgtttgtttgttttttgagaaggagtcttgctctgttgcccaggctggagtgcagtggtatgaccttggctcactgcaacttccgcctcctgggttcaagtgattctcctgcctcagcctcccaagtagctgggattaccagcaagcatcaccacacccggctaattttcgtatttttagtagagacaggatttcgccatcttggccaggctggtcttgaactcctgacctcaagtgatctgcccgcctcggccccccaaagtgctgggattacaggcatgagccactgtgcccagcctagaagaatattttaaatatttgtttagaagaggattttttgtgttttttttttttttttgacatggtcttgctctgtctcctaggctggagtgcagcagcttgatcatagctcactgcagcctcaaagtcctgggctccagcaatcctcccatctcagccttccaagtagctgggaccacaggcacacaccatcatgcccagctaagtggagatgggatcttgcaatgttgcccaggctagcctcaaactcttgggctcaaacaatcctcctgccttggcctccaaaagtgctgggattataggcatgagccactgtgcctggcctagaaaagtattttaatttttactttgaagagttaattatttagaaaagtgttttcagtaatattttgtaggtgattttcattttgttggcattttatttataatgctgattttttgttactacattgaagttagagaatatgatctatataattctgtatttcagaatgtattgggatgttgagacttttcttatggcccaatatgtgtgatatattttgaaatatttaatatacacacatgtagtccctatagggtacaattttaataactgtgttattgtcttattaatcacattgctcatgtaatatccttgtttccttttgaggattctgatgattgtatttccgtctatttttccatgcattttttctgcttttaactttttaactgcatctttttttttcactataaattttagaggtaattttcccaccacttagggtacatttatattttccttttgatgcaagattttatcacaacctcttttctgagcttttctcacccttgtcattttttgtgtgttactgatctttaaacaagcgagatccattcaggcagaatggctacatcttttactcgcctgttttctgtcccctctctctcctctccccagccatcaaagagctatcttgataacttttaaaattatctttcacaacaggcactgtctttaaacacagaggaagacattcatcgggctttccagtcgcttctcactgaagtgaacaaggctggcacacagtacctgctgagaacggccaacaggctctttggagagaaaacttgtcagttcctctcagtaagttgaatcaatagaacaataaaagttgcattcaacatacctggtgatatagagtctgggagaaagaccctagagaaattgagaaatttatgttaaccaatttaaaaaaattgcactatttttttttctaagatggggtctcactacgttgcccaggctggtcttaaactcctggtctcaagtgatcctcctgcctgttgggattacagatgtgagccaccacgcccagcctaaacttctttttttttttaaagactgcaattctataattataccttgcattagtattgcaaaagtagtctctacttttcttgaaaggtaaaattgaaaggtaaaattctcaagttcatttctggttattcagggttcaatacatacctattcacaaactctgatattttaacatatcttcatatgatcacttttaaagagttatgtatattctttttattaaaaaaagataacatatttagaatttttggaagtttgctgacatttgtatttagcaatgcagcctcactgaacatttttctctccaaagacgtttaaggaatcctgtcttcaattctaccatgctgagctgaaggagctttcctttatcagagctgcagaagagtccaggaaacacatcaacacctgggtctcaaaaaagaccgaaggtcagaatgacaagttattgcaccttcctcccaacccgtcctcctcctgcggctcttcctattcctccttcccgcctcttatatcctctctcctcctcctctccctcctatccctcctccctctcctcacccacctccacctctccactccgccccctctaatttcacgggtgtttcagatggtcagagtagtgttgactggcagggcctcctggcatactgaaccttgatggactcataaaggttctgatcagacattcaggttttcagcaacagagatttacttttgtctattctcccaggaccagagtagctgatacaaatgtcaaaagagggccagccacggtggctctcgcctgtaatcccagcaatttagaaggccgaagtggacatatcacttgaggtcaggagttcgagaccagcctgaccaacatggtgggaccccccccccccaacatctctactaaaaatacaaaaattagccaggtgtggtggcccatgcctgtaatcccagctgcttgggaggctgagacatgagaatcacttgaacctgggaggcagaagttgtagtgagctgagatcatgccactgaactccagcctgtctcaaaaacaaaaaacaaacaaaaaaacaaatgtcaaaagaatctcaggccaggtttccagtttaataacttgcattaaaatatactctccctggcctgtaacattcacatgtcaggtgactccattgtctctgcgagaaggagattggtggacagatcttgcctgaggtatacacttgggctgcctcttcctaggttctgggggacctccatcaccattacctttacctgctaaggtcactcctgacttttcatgtcttccacttaagctcctttagtttgacttgataagcctacatttgattggttaactgccgaccctctctcagggctgatcagttccacagactgaaaataccctccatttggggttgaaccttattcatctacatttcagaaagtgacgtgttccagtctaggcctccaagaccaatgatggtctgatgaaccattcagactcctctgcgccaattatgcttagtaccaccaggaacatttccatttctgtgaataaatgagacggtaaagaatgggagacgttcttcgcttaaagtctcagcagttgtttcccgcattcctgcttggagtatttaccacggatgctctcttcaggcagtgggttagcagggatgccctcagttcattgaaacagtaccacttgatctccagggaaagaaggggtgatctttgtttgcccacatcctcttttccagggatgcctagtgctttgttgaggggattcagcaggaatatctcctccaaaagcttctggaaactccccatgtgcccaatgtcagctcttcccgctttgagccgtccattctggttgcttctgacatgtccatgtatagtcacagaatgttagaactgggtgtgatcatgaagggttggatcaaacactccaattaaccatgtgagacaaacaccccttcagcctatcacatttcctgctggtcttgttctccaacctggtgtaatttttctactttgtaccaacctgctttcctcgagtgacttaggtatctttcaccatcctcaacttggtggatgttctcaaggtgtcagtaatcatgaataccactcatatgtgctgtttttatttctctacataacaacccaaactcagcaaagttgaaaacagaagtttgcttctcaactaatgatccaggatcatccaatgcatcaggttcttataaaaagcaactgaatgtagtctctacttttcttgaaaggtaaaattgaagagttgttgccgggtagctcaattgatgcagaaaccaggctggttcttgtcaatgccatctacttcaaaggaaagtggaatgaaccgtttgacgaaacatacacaagggaaatgccctttaaaataaaccaggtgggggaagctttttaaaatcctgctagtttgatgaagaagttgaatggaaagatttaactttgtaaaagtgtaagtgacataagcgtaagccaaaaggaatttgaaacttaaagtatttctgaatgaatttcttaactcagtagaaaaaaacggaaggagtaaaagatatttgctgcatatatatattatatatacgtatatataatatatatatattatatatacgtatatatatatattatatatatatacgtatatataatatatatatatatatgtagtgttttatcactgctcttaactgcctttgataatttctcataaaccattgctgccacctagttttggaaactaaagatcttcctataagcccaatttacttggctagaaagcaaaaaaaaaaaaaaaaagtgttaaggtagtgtgatatgtgggagtgagaggcagtatagggcagggtagagggagagaaggtgaaaacatgtgtctttaattagttatttttaaaattaaagtaagttttgatttgaattgttaactaattatcattaattcagtatttacagctttttaatattaaaacttcatgacaaagaccttagttttgacattgaagtaaaacttaattaaggcaggcattagaataatttgccaaatcttccagcccctaaaaagatactattttaatgcaattaaaaaacaaaagcaggtaaccctcctgcattttttgtaaggtgtactttaacttaaaaaaattagttctctagttgcaaagggtgggaggaggagaattctaaccctggttttagaactattttaatttttataataaatgatctgtatcaattttttaaagtattacattaataaatgtaatactttgctgagcttctatgtgcttatgcctcttctgtattttaaaaaagttatttcattagagtatcagaattgaaaagattgggttaaaatacattactacatatgtaggtcgttactctttctgagagagtgtatccatttatactccctgtcatgctgttgtggaactataagtttcatcccactttatgattttttttctcatatgttgggttggataaataggaaaaacaatacacatttttttctaattaaatcaaaacaaatttgtatttaatttcatttgattatattgctttcttagatctatttgctgagcacaatttaaatgagaaacatctttctcctctggaaaatgtagggtatcacattttattttgcagaagaaaacctttcccagggtggtactgtgtctgcttgcaatgaagataggaaggaactggttgactttttttttttttttttttttttttagtgttaactggggcatgaatgtggcggtttccatcacaggtgctgaaaacactcttggaggcaactgcagctcttttgaaagttttaattgcgtctttcaataatccttcccccaggaggagcaaaggccagtgcagatgatgtatcaggaggccacgtttaagctcgcccacgtgggcgaggtgcgcgcgcagctgctggagctgccctacgccaggaaggagctgagcctgctggtgctgctgcctgacgacggcgtggagctcagcacggtaagacccgggctgcgggaagaacccagggacacctttgcgggcagaactcgagtgccacttccacctctcatattcaccttctgagttggcgatgcggcagacgcacactgtgcaggcacttggcgttgggatcgaacttttgttcaaggctgacttttcccaatattgtctgcgtgatctgccaaactacacatctcagtcctctgttttttcatcgctagaaggagtgggcggcggttaaaatgccttttaaaataaatcaggtaggaggaagcttataaaaatcctgctagtttgatgaatggcagacttttaactctaaaagcataaatgactgctcggggttattgcctcctagagttatgatgaggataaaatgtgggtaattcaggtaacaagcttaccacattgcctggcaactagtaaatgctctacaaatgtgatccattattacaatcatcattcttagcattatgcttttaaagtctaggaacctgaaatagagaatgaggaagtcttaactttgacctaacaaggctgggagggggcatccagggaggtgtgaagtccagttctcagagggtgggaccagaggcagcctctgagggcacatccaggcactcggcttcctttcagcatggatctccagggtgagagagtcaaccatggcaaatggcaggcagtgggaccccatgacttaagaggtctgtgtgcgcagcagccattggctctccctctgcccaccttcctgaaactatgctccggaaactatgcagaatctctctggggcagataatcctctggtaacctctctgctccggaaactatgcagaatctcacctgggacagataatcctgttggagtggctcacactgagagccctttcgtttccaatccttttctttactagcaatggtttgttgtctttaaaaagactatgtttgaaaaaaaaacacagtcgcctgggcattgacacttgtcacaatacaagatgtctctggagttgttggataaggagaggacagccacagccttcctgcctctgagtgcttggtgtctctcccccttgtcaaggaagtggcacatgggacataggacaagtaagagtgctcacaagcttctggcagatgaaggggccactgatcctatgtgaacaaacaacacctacgtgcaaggggaggaagggaactgtgagtgcctgtgcgcttgtacatgtgcactgaagtcggaatcttaaagtctaattctggtctttcaggtggaaaaaagtctcacttttgagaaactcacagcctggaccaagccagactgtatgaagagtactgaggttgaagttctccttccaaaatttaaactacaagaggattatgacatggaatctgtgcttcggcatttgggaattgttgatgccttccaacagggcaaggctgacttgtcggcaatgtcagcggagagagacctgtgtctgtccaagttcgtgcacaagagttttgtggaggtgaatgaagaaggcaccgaggcagcggcagcgtcgagctgctttgtagttgcagagtgctgcatggaatctggccccaggttctgtgctgaccaccctttccttttcttcatcaggcacaacagagccaacagcattctgttctgtggcaggttctcatcgccataaagggtgcacttaccgtgcactcggccatttccctcttcctgtgtccccagatccccactacagctccaagaggatgggcctagaaagccaagtgcaaagatgagggcagattccttacctgtctgccctcatgatttgccagcatgaattcatgatgctccacactcgcttatgctacttaatcagaatcttgagaaaatagaccataatgattccctgttgtattaaaattgcagtcccaatcccataggatggcaagcaaagttcttctagaattccacatgcaattcactctggcgaccctgtgctttcctgacactgcgaatacattccttaacccgctgcctcagtggtaataaatggtgctagatattgctactattttatagatttcctggtgcttagccttataaaaaaggttgtaaaatgtacatttatattttatcttttttttttttttttttctgagacgcagtctggctctctgtcgcccaggctggagtgcagtggctcgatctctgctcactgcaagctccgcctcccgggttcacgccattctcctgcctcagcctcccgagtagctgggactacaggcgcccgccaccacgcccggctaattttttgtatttttagtagagacggggtttcaccgtgttagccaggatggtgtcgatctcctgacctcgtgatccacccgcctcagcctcccaaagtgctgggattacaggcttgagccaccgcgcccggctatattttatcttttatctttttctttgacatttaccaatcaccaagcatgcaccaaacactgctttaggcactggggacacaaaggggacagagccatcctcctttgacacctggtcttcagttctgtgcccaacgtatatagttttgacaatgaccaggttggactgtttaatgtctttcaacttaccacgtaatcctcttgtagggatcacatctttctttatgatattgtatttctctacctctaacagtaaaaattccattcaacccttaaagctcacttcaaattcttctttgagaagtttttcctttctccgcaaccagatgtacatatttgaactctctttgtacttggagggcacttctttcgtggtagttcttttatttttattaatctctgtatccttagatagtcctccaacaaccaaaggttgggactctgtcttacatatctgggtgcccctcatagtgcagtaataagtaagttgattatatacgagctatgtaacttatattttttaatggttggatatcactgagtttttttttttaagaatttttttattgaggtaaacttcacataacataaaattaactattttaaagtgagaagttcagtgccacttagtattgttaacaatgttgcataaccaccacctttatttaaagttccaaaaaaaatgttctcctctaaaaggaaaccccatcccattaagcagatactctccattccttccttcctccagcccccagcaaccaccaatctgctttctgtctctatggttttatctattcttgctattttatataaatcgaattgtatgagaccttttgtgtctggcttctttcacttagtacaagtttttgagatttatttacatagtagcatgtatcaacacttcatttttatggccaaataaaattgtattatgtgtttatagcacaatttatttatccactcattcattgatggactttgggttgtttctgacttttggctattgggaatagtgctgctatgaatgtttgtgtacctgtatttgtttgaatgcctattttgcattctcttgggtatatatctaggagtggaactgctgggtcatatgttaattctatgtttagctttttgaggaacagacaaactgttttccacagcagttgaaccattccacattcccaccagcaatgtatgagaattccaatttctgtccacttcctcaccaacacttattattttccttttcctttttttaaaaaaaataagttatggccatcttagtgggtgtgaagtggtatctcattgtgttttttatttgcatttcctatgtaatgagctagaaactaaagtacaaactagatgggacatccagtccctttgatagataatgctgagtaaaaaatgagatgaaagacatttgtttgtttttagaacatgagtgacagtttgttaaaaagctttagaggaggaatgaaaacaaagtgaagtacacttagaaaagggccaagtggacatcttggatgtcaagtgcctagttcagtatcttttttttttttttttttttttttgagacagtgcctcactctgtcacccaggctggagtgtagtggcatgatctgggctcactgcaacctcctcctcctggattcaagcaattctcttgcttcagcctcccaagtagctgagactacaagcacccaccaccacacccggctaattttgtatttttcagtagagacggggtttcgccacattggccgtgttggtcttgaactcctggcctcaagcaatccgcctacctcagcctcccaaagtgctaggattacaggcataagccactgagcccagccctagttcagtatcttttatgtaaattataaacatctgcaacattatgtatcatatgcagatacttattgcatttcttttattagtggtgaaagtgttctatgcatttattggctcttgaatttcctcatctatgaattgtcattcacacacctacttttctgcttcgtttttacatatgtctttgcctattaaagatattatccctctgttttatattttctctcattcttgtattgccttttaaattttgttatgatgtttcattaataaacagtgttttgttttcctctataatcaaa

SEQ ID NO: 970 - DNA, 466 bp, Homo sapiens
taaacctcttctctttgtgaattacccagcctcatgtatgtggtttttttttttatagcaacacaaatgaaccaagacacagagggcacaatcatgacagaaattcttgttccgctctctgttttaatttagaggttgataatatccagtattggtgagcatacgagaaaacaggcatccttaccttgtgtgtgggaatgtggattaagggtttttggaaggaagtgggcagccttttcattttaaatggacattctttttgggccagcatctcacttttagatgtctgatctacataagtatttgcatacatgcttagatatgctaaggttttccctgtagtattttcaaaggcatttttgcagggtaatttaaaaaatcgtggtaaagaaaaacaaaatttaccatcttaagcatttctaagtgtacagttagcattgttgaatagcaaaaaaggaaagaaaaa

SEQ ID NO: 971 - DNA, 466 bp, Homo sapiens; identical to SEQ ID NO: 970

SEQ ID NO: 972 - DNA, 517 bp, Homo sapiens
atttgaagagggcttgccttccaacctataggcactatatatgcttttggaaaaagtaattaggttaagatgcagttgttttgttttgctttgtttttcccttagctgggttggggtttctagcagcaatgatgtacaggtggatcttttttcacattaacactaccagctgctccatggctatagtgcttaggaatatctcagaatttcaacagatctatcagctgcaatatctaggagtcttgccaacacagagacacattcacatgctgaaaagagcatgagttgaaggcacagctggggacttttgatgcaggtccagaactggatggttgtgaagccattagagatatttaaattgtccagaatttcaggctctgctttaaaaactaggctacaaaccctcattcagaaagaggtcagtaatatgcctgtgagttagaaagatactggaaacatttcaatgccaaaagtaacatttttttccagaatgctatgactaaattttttaaaaaaa

SEQ ID NO: 973 - DNA, 18501 bp, Homo sapiens
  misc_feature (9479)..(9480): n equals a,t,g, or c
cccctgccttttttttttttttttttgagacggagtcttgctccgtcgcccaggttggaatgcagtggcgcgatctcggctcactgcaagctcgactcccgggttcaccccattctcctgcctcagcatcctgagtagctggagctacaggtgcccgcaaccacgcccggctaatttttttgtatttttagtagagacagggtttcaccgtgttagccaggatggtctcgatttcctgacctcgtgatccgcccacatcggcctcccaaagtgctgggattacaggcgtgagccaccgcgccctgccagcccctgctcttttcaaagcctgcttctgcagctgcttcatcaatgctatttactcccaattatctttccaatcaattcccttttgctcaaattggagtcagtttctgttgctttcaacccaaagaacagttaactgatccagctttcatcatctggcccatttccagtcttagttccctccagcatatgccataaccatagctcagtggttctcaaacctgagagtgcaaaacaatcacctagaggtcctgttaaaacaaatttctgggctccattagcagcagttcagttcccaagtgatgctacctctctggtctaggaaccactgctctagagttctctttacatctccccagcgtatacccctatttgggtagggtattcaactgtcccattttgcccaggacttaaaggtttccagggaagtaggactttcagtgctgaaaccaagccagtctagggcaaactggactgtaggaattgtagctgcaaagagccattctcttcaccacccacaggaaatagaaatgaaatgtaaacactttcattccactctcctttgtccccattaaggaaggacttggtaggcacactcagcagatgaaacattaaaaggctgcctctccttggcatagaaatcactttctgatacagagaatggacttaagcaggtatccacagagactactttatttatttacaatgccatagtttagaaaacaatcactcctgtacgtggttcttaccttaaggtcaccggaggagaacatgctgatgtaattgttgaccatcttaaacacataccctcggtccataaatgtaaagcagcgctaaaatagataaaattctaaatttaaacacttttacttgaagaatcattaaagattttagaaaatatgattaaatatattgaagtaaaataacactaaactaaatgtgttgtataattaggtatttaaaaaatcttctaaagatgtttaagcagtcatccacatatggcaactaaaataactacaatttatattaaaaatgaaaatgaaacagggcaatatactaacagagaataggtacatttaaaaattcagaagaaaacaagaaaaattgaaaggaaaaacagaatgaaagcataaatgaataaaacaaaaatatcaatcagaaagttataaatctatattgattttataaaatgtcactggagctttgcaatgaaatattatagccccttcttttttatacagaaagctttagctttcggttgtctacttttttaaccacttagttacattttattattttcttttaataattccatttcacacttatggggttgtaaatcttctcctgtacacactgggtcataatgaggagtggtagagacgagtcaggaaagccttttaaatctcactggccccttttgacagagtagctcctctccttatcagctgaggaagcttgcatttgaaggctgaaggaaggagatcgtaagatttctatcagcgagctgcttactacctttcttattctgtggtcaaattctctttactgtatcaaggagagtcttaaacagtaagtaggcttggaggagcacttgctctctctccaaaagacggatggtcatgtaaccagtaaccaagctaccacggccaaagactgcacaggcaaagtgtggagcaggaggaagggaccatagttcccaacgcaggatctggggaggcactagagcaggtgcctcccatagtggatctgcagctcattacttggtgtgtgagtctcattctattcacccacgtgggtgtgagtaaacatgctgcttgggaaaattccacagctggtgtggagtgcttctttcttgtcgaaagtgtccaggatgatccattaaaatggttttgcatttcttggagtctctcctcaattttactcacagacaggactacacataaaatcttgctatggagagtggaccaagagctctatggaaaacattcatttattccaaaagcacaagctatttaagccaagtagagtagatatgaagggttttcactttttagagacttgcttatccatccttatctgatatttagagagaaataccacagatgtttaaaccaagtctctctctaatattaggtgatttccaaatggttttcaacagctcattgaaacaaagcagtggttagtcaggcgaatgggctaaaagatacggctatccaatcagcaaaataaaaatcagaatgaatcagcctttgctaccatcttggtattgtgcttcataaaaagagtgtctaaataggtatgttcagataagtagagctgtgacccaggtgggtggcaaaaagaaaaatgacaaaagctgcaatcatttgaatcctatttacttcactgagagaatagttgagaaatgtacaagctttttggcataattgctgaaaaaatattactttcccataatgtggggtaagggaggctaccttttaatgtagaacatttttatatgcccacacactggttcccagaggttcttcttgattcttggagaccaattttgagcaacccatggagttacaataatattttaattgttaaattccaatgttgactaattcacagtatttgctaatgtagacttcaataacaaaaagaggtagcagtcatttgaagccccaattgagcaaataactattgtttgctggaaatataagagatttatgacatcagcactaggagtgggctgtgttgagcatctgaaaactcaaatttattggaattgcaccaaatgactacgttcagttttacattttcaaaaatcactttcttttcctttcttttttttctctcctagctcaaatgattcatctaataagtgttccaattttttttaatattatgtgtcaaataaatgccattaaaacttcaaattagtaataaggagggtaactatgaggtcttttcccttttttagagacttgcttattcgtcattttttgcagtttagggaagaatatttcagatgtttctttcaatatattttatttgcaaactgaactatacataattctttctaagtttcctagtaaactattagcatagcaataaactttattcccataggtcttaaaatgtggtagaaaactacagtaacttttcccccctttaaacttttcccctttaacacttatcattcttgtctctttctggaagcaagaaaaaagtaaaaatcagagacaaaaccttgaagaaaaaaataaattcaggataagaacacatacagtgtataatttgaaatagtttttaacacattaaaaaaaagaaattaggctggattaaagctcaccagtgacaagttgggcccattttccacttctataggcttttaactgtatattattagcatttatttatacattctcacactcacccatatgttctggtgactaccattaagaaacaagtcaaatgacttcataaaggttatagtagtcaagagttagactaaagaaggaggcacagaaaactattatctttctaattgcttgcattatctgttaaatggtatactgtaattatgtatcttagttttttcttcgactttgcatttctttcctctcagctcaatataaatggttgtaacccaatgaaatataactaatttccatacatatccagtttagtaagtagctactcaatactttacttgataatttttctttcatgggatcagtgtgatctttccataatgtaaaaaacagcgtgggtcaaccttggtggctcacacctgtcatcccagcacttagggaggccaatctcttgagctcaggagtttgaaaccagcctgggctacgtggcaaaaccccgtctctacaaaaaatacaaaaattagccaggtttgtgtctgtgtcctactcaggaggctgaggtgggaggatcgcctgagcccagggaggttgaggctacagtgagttgtgatcatgccagtgtgctccagcttgggttgacagagtgagatcctgtctcaaaaagaaataaagaaaaaaaagagcctggagataataaacaaaaatgctaaattcctgaagcgtttcccaaagtggctatttggtatcactgtcagagctaaagccattataacatcactttcaaaggcagaaatgtccaagagaataatattactgtagtgcagcttcctttttaaaaatttcattttttctcttaaaatatatttagaaatactatgatttgactgcactcaaatggatacttttctctaaccttagttttttttttctttcttcctgtcttttttttttttgagacagtctctctctgtcaccaggctagagtgcagtggtgtgatctcggctcactgcaacctccgcctcccaggttcaagtgattctcctgcctcagcctcccaaatagctaggactacaggcacgcaccaccacgcccagctaatttttgtatttttagtagacacggggtttcaccatgttggccaggatggtctctatctcttgacctcatgatctgcccgccttggcctcccaaagtgctgggattacaagcataagccatcgcgcccggccttctaaccttagtctttattcaataagacttcaaattgaaaaaaaaaattaaaaagtatttcaagcaataaagatgtataaatgaaagttttcatctgacagtgctagttttgatttttcatcatacatgaagatgtgaactgatgaaagtttagactatcttgcatccaccaacatggggccttgaatagaactgcgatctcatataactgtaccttgagaaatctggcaacgctgtggtttgcccttcttgtttcttcaagtgcatccttgtatttccaaatcacatggtcggataggaccatgacaagattgtccaattcattttggtaagattcaggaaatctctgaggccggggaagctaaggaaagaacggattatatctttctaatgtggcatgtgaaatattaagccgaggaagtatcaactgaaatatttactttattttataggtcattaaagaaaaagaatccttttgaaaacttgaaagcagtaataaaatagaagccttttactttcaaggtcatgatttccatcattaatatttagtgtttccttcaattttggtcaataaaattttcactttataataaaagtcaatcataacaaatattaattgcaaactattgaaacaatgtagcaatgtacaaagtaaaatgtgaaccttctctgtggcctctcatatcttactttccctccttccctctcagggaatagctactattaatggttaatgaacattattctagatattttggacatgtagttctctatttcatttaaaaataaattattttgatttttttacaactaggaatgcccccaataaactagtctaagaaattaataaatgaataactgaatgaatacagatattggtttgaaatgtcctctgacatttggtgagtcccagctagttttaactccctggtcccagtatatgccacagttaagagacaccagtgggacctcacaagtcaagataaagaagggcttggctgtgagatgacattacatccactgaataaagctctatggatctcaaaagaccatttcaggtccagatatccatccctcctgtttggactcctgcatatgaggggaacatttgaggcagccgagttcttccatctcagactctgcttttttttttttttttttttttttggagacagggtctttctgtgtcacccagattggagtgcaatggtgtgatctcagctcactgcaacctctacctcctcagtttaagtaattgtcccacctcagcctcccaagtggctaggactacaggcgccctcctgtagtccatacccagctaatttttagtagtgacagggtttcgtcatgttggccaggttggtcttgaactcctgacctcaagtgatctgcttgccttggcctcccaaactgctaggattacaagtgtgagcccccgtgcccagccttacttctgataagattcattcatctttaccagctggctttaaaaattagacccagacacattttcactatagatagaatcatggaatttagagttacactgaactgtgtatttctaaattgtgagcacccagacttccatgctgcaaggataaaaatcatgaaggctgaagttacaggagttgtatgaaacagatatttaatggaatttaacgggatgttggagctggtttaggctggcttctatttttttttttttttttttgagatggagtttcgctctgttgtccaggctggagtgcagtggtacgatctcagatcactgcaacctccgcctcctgggttcaagcaattctctgcttcagcctcctgagtagctgggattacaggcacctgccaccacacctggctaatttttgtattttttagtagagatggggtttcaccatcttggccaggctggtcttaaactcctgacctcatgatccaccagcctcagcttcccaaagtgctgggattacaggcttgagccaccccgcctggccagactggcttctatttttaagccactttaccaggacatcactgcatggatatttttgaaaatttcatggttactctctatatatttaaaatttattgttgaaatcaaataaattaacaactaatgaacttaactgatttgatcacacacagcatttttaaattctcttccataaaacttgggtaataaaggtaaacaattcacctacaaaaagcaacagtcaccttttaaagaatcaaagcacacttttaattttcaattttcgttttgttagtcctctaaaattccttaagcatatcatacgtacattttccccacatgcatatgcatgaatgccttgggctttaatattccatttgttccttcctctttacaccttcctctcaaagtctcctgtggcctactctcactctgaacccaaagatgtctgcctaataaatatatgagtacttttaaaactgttttcccgaagtatatcctaaagactcgaggtggaagaattcctgcactggagattgtgaattttttgtctcaggagatgaagggagtgagatggtggcacacttcccaagctgcagagctggaccatgatgaatctgagctacagcatggcgaggtcaaggggaacaggcctgggatgcatgggcagaactgtaggcttttgggagttttgttagaaacaaggaggatgatgggaaacaaaaggtttagctggttcaatgatccttttgctactagagaataatgttgagaaaacattcagtggttcccaggaaattgttttagtttgtttgtgttttgttttgtttgagacagagtctctgtggcccaggctggagtgcagtggtgcaatctcagctcactgcaaactccacctcccgggtttaagcaattctcgtgcctcagcctcctgagtagctgggattacaggtgtgtgccaccacatccagctaacttttgtatttttaatagagatggggttttgccattttggccaggctagtcttgaactcctgacctcaggtgatctgcccacctcagcctcccaaagtgctgggattacaggcatgagcaactacacccagccattcccaggaaactggaactcacgctggccaagtgcccaacaacattgcaccttttagaggactaaaccagatatctcccctgacttcctcagatcttccacacttactccttggatgatggaaattcctttaatagtggagaaaaccattcacttcacaatttaaaaagaaaaaaaaaagaaaatacaaatagcttgggaaaagtttactgtgaatgctttggtgtcaaatgataatatcagggctgggtacaatggctcacgcctgtaatcccagtactttgggaggctgagatgggcagatcacttgagcccaagagttcgagaccagcctgggcaacatgacgaaaccccatctttactaaatatatataattatctatctatctatctatctatctatctatctatctatctatctatctatcatctatcaatcatctatatgaaattagctgggcttggtggccatgcctgtagtcccagctactagggatgctgaggtgagagaatcacctaagttggggaagttgaggctgcagtgagctatgattgtgccactgcactccagcctgggcaacaggagtgagaccgtgtatcaaggggaaaaaaaaatgggccatgcgtggtggctcatgcctgtaattccagcactttgggaggctgaggtgggtggatcacctaaggtcaggagttggagaccagtctggccaacatggtgaaaccccgtctctactaaaaatgcaaaaattagctgggtgtggtggcatgcacctgtaatccaagctgcttgggaggctgaggcaggagaaccacttcaacccaggaggtggagcttgcagtgagccgagatcgtgccactgcactccagtgtgggcgacagagcgaaactccgtctcaaaaaaaaaaaaaaaaagtaaagaaaaaagatgatatcaggtcttttcccactgtgatgattagagatggttagagtggaaggtgcagggctcctgaaagaaaactagggtgtgagggttaccactgaaaggggtcacggaaagcaaacctcaatcggagaagataaactgctggacacaatcatgctggctattatcagttcatttattcttaggctgctcacaggtgtgttttgtgacctgtctatacaagcagatgcatactggtaggaactagaagagaattttagtccaatccactcttcttacagatgagaaaacaggcactgagatgttaagcgtcgttttcgtcagctaacaagttagtgacagagcaggaattgcaacagtgaggtttcctgaccccagtagagcttaacaacagagagatacgaaccatttttacctttgtgttagattttctctccctcccaggtaggaggctctcatctccagaagtggagagcagaaatagcagaaaagcaaaaataggatttgcgagttaagagttatggaactccacagatgattaaaggtccagcaagccatttctgtcatactagatcanngccatggttacatagacctggggcctagaagcatggatgaggacctctggatggatgactctgaggaagtggctctgcacacttccctgaagccttagtgctagcagaagtttaattcctccctattaagtgtcagcactcctcccatgcaagatgatattgcaaaggcctctccctgctagaaatcaggcaaacccttgaggagttgtcccgcctctccttctggtgatcagggcaatacctggaggttaaatcctagcttaacccagctgggggcttgctgggcctaataaagcaggaaagagaatatacccaaagaggctataaaaattagctatcatgtaccaccaggaggtagggcagaacctctgcaattgtacattgaggatgtgggccagaaagtaagggcaggtaacttagaatgcattgacatgggtgtgctttttcagaacatgggattaaataaggactcacgggatgagcaactcactgctagggttgctctgagaatctagagatggcctactttaagcaaagtcgaaatgtctggttgtcctggcagaggatagaggaaaaaataaagaggtggagggaggtggatatacaggaatggacattaattgagactggaagatccaccagtgtatcaagttccccaggcaggcccagaagacagcatgcaccatggccactaagaaggtgctggggaccaatatcattaagaaggtcaggggtgtttcccatctgttggcaggaggagcagtcacagtcttggctcatgagcagccatggggatcagggatcaccaaaacaacagaggccatgtgctgtgcttaatctccaggagccagggggctgtgagtatcatgacaaatgacaagactggtggggaagccaagagggaccgactctcagggagttgtagagctggttaatgatgactggaactcctagggacaaaacagagagcaaccaacaatggtggtacatcatattaacaaagaaggcaagaatgggcaactggaagatggggatgttcattccaatgaatagtcatggttcctttgtctgttcctggacctgagtcacaattcagatctggtacacattgactgaagaggtgatggggtccctaaaggaaagcccccactgcaacaatgcagtagatacatactgtaatgagtctatcaattcttctccaaagggccctatagccatttactcaggctactgtacactgagaagaagggcatatagttcaaggactgttgcacacagaatctgagttgacattgatatccagaaatgaaaagcatcaccatgtctgccctgatagagtggggacttacagggattaaaggtggagtcctgactaaagttctgttaacagtagatccactgggttcaaagatccccccaatagtcatgtaactggtcccaaatgtataatttgtattaataaaactggcatttggagtaagcttgcacgggtgcttggtctgtggaggtatcctagtgggggaggccaggtgggagcttctgacactgcttcttccccaccaaaagagtaaatcaaaataatataactgtacaccaccaaccccacctcatgcagcattgttatgatttaccctccacgtggggcaggggcaatgccagaggtcttcccttggccttacccacaatgggggctcagagaaatgtgtgtggaactcaggtgatctacctggctgcttcttggtcttcctcactccattgtaactgtgaatggccataggtaccaactctggtgtgagtagagtatgatgaccagaggctgagaccactctagaatgagggtttgggtcatatcaccaggtgagtcaccaagaccttcggagctgctagttagagtgagagggatctagaatggagagttgggatgggagatgatgagtaatacataggctcctgaaaagccatggaaggggctgtaattaattccatcagggtccctcttctaagcttcctttcaggaggggaggcccatgggaactgcagggaagcagattcatgaacttgtacaatatgtcatgcaaacttggactgtggcagccaggaatgcacatcgctcaaatgttccttcaagacagaatctagtgggaagaatataaagagttgctgtatcttgcaatatgctccagcattcatgccaaggctaccctccccccaggctgctcccagtcaacgacttagcttgcaaaggtcctggaggccgatggccttcccagtgcagggttcctctaatgacaactctttgctctcagacttcccatcagcccagctaaaaccttgtcactgtgagactcttcctagccaatcctccttccttcccccttttcatttacaggtatcagactttcccatttctttttcctgttccttttatcctttatagttatttccctccaatacatcttttgcacttccaatattgtcttggcatctgcttctgaagggcctgtgccggttggtgtacacaatcatttcttctacttataaagtaattattgtaaactgctaaggtttataaagcaaataaaaatggaactcatgacagcataatcattagtgtaattgttggataatattgtaaaaatattataatattatattacttatgttcttacctggattttatttgtgtcaatcaagtgctgtgccatcgattttaggataattgcaaagaagaaccaggaatgctgttgggaaaaaaaaggcaacgagacatttattatcctatggcaaaataatgataattttttctttgcaatatgtaatactataacattgttatgttaaaatgtattctttgaaactaaatgaattagagcagtaaaatattctctattatagtgggatgatttttatctcaatcctctcaaaaaatgtttaaactaaaacaagttacaagtttatttggcatgactgactaagcagttgttttacaaaatatttattcaagggatgttctagttgtttcacctagttaaacaaaactaaacaaacttttatttatttatttatttatttatttattttttgagacagtctcactctgttgccaggctggagtgcagtggtgcaatcacagctcactgcagtcttgaactctccggctcaggtgattctcccacctcagtctcccggacagctgcgactacagatgtggtcaccatgcccagctaactttttgtgttttttcgtagagacagggttttaccatggtgcccaggctggtcttgaactcctgggcttaggtgatcctcccgcctcagcctcccaaagtcctgggattacagttgagagccaccaagcctgacctaaacaaactttttattgtaccaagctcacccctcaaatttcaaaggttagaggtaagggtgaaaatggaaggtcatatgtctagatatctagaagttggaagtcaagctgaaaatgtgttaaataaaatatgtttgatcctcctacctcgagaaacaaaacttcataacaccttggaatgctgccccagggtgtgaggtcctggggggcacagggcctggcctgccccttttcttctcgcccaaggctccgtcctgccccttgaggggcctggtgcgcatgtgttaaatactttaaaaaacaaagcttcaaaacttatgtcacctaaataactcaatctcaaaattatctgctcatgccagattttgtcatgaaataaatgcaggcccaatgataagagcagtacacacctgttcctacttagggctttgcagaggtagggccttgtacgcctgagctcttttggaaactgtccagcctgcacatctgagtgctgtccacaacctggccctcctccctgccgcaaatagctccttaatggggtctagggttgcactcaggcatcaagacctgtcctctggaggtcctggagggcttgggacagagattgaagcaggcctggaaatccacctataggaccttgagcaagagggtcttggggttccttacaggtctagaaggggaggtaggggctcctggtgggcttgttctcttagctcctcttaaaccttggcctgtgaggacaggtgcagtatgagaagaacaaagctcatcccaggatgggcacccttctttcttgggcctaagggtgacacttatctcagctacaaaaagtcatattgtatatgtatagtttcaagaacgcaccccttgcatcctctctgcttcctactccttccaccacagataacagttttaaattttgtgctaatcattcctttgctttacttcacaattttgctacgaatacttatacaatgaagggatatttagttcatctggccactgaacttcataagaatggaactatcctctatgtattcttctgagattgcctttttcattcaacaaattctgttctgtggttcgtttatgttgaagcacgtagctggggggatcacatatggtcaccacatgacatatataatcaccatgtacttatctgctctactgtcaatgggcatttggattatatcctgttttaagtcatacaaacaatgctgcgataaacttttgacaagacagtcctaattccagaagactgactcagataaaaaagagaagggattgatattctacaaaggcagctatggcttaatgaagtggtcacttcttagtaagaagaaatggaaatggctaccaatactattctagcactccaatagcattctaatggctattagaagtgaaacatgttgttaggaatatgaatgaatcccaggcacactgctgcaatcctctttccctaatcttgtccaaaatattttgagccatcgtgtcaagtgttccaacatttgtctcttaattcaacagactcctacccctctccatcccttagcactctggcctgcctccactattttccttgaaaccaccagcactaatgaaattgagcttttgcctgttcacgtctgatgacagatgaagcctcaactcctctactgccctctccacatattcccttatatatctgcacattccactgcttccaatctcctgaaacccacccaccccaccttccagagcacatggtccatcgttagcacaatctcttgaagatgcaattcttctccgagcattcccttcactccatattttaactgagcagtgactctccccagaggatcctgcttctctgatagcccctcaagtggttgtggtctccatttttatcccactgtagtcgattctcaacacagcaatcagagggatccttttaaaccaaggtcagcttggtttaaaacattactcctctgtgcaaaaccctccaacgacacaactcccagttctgctctgagtgggaacgcctggcctatgctaactcccaagcctccagtggcttccatgacttcatcgtccatcttttttttttctttctgctcacttggctccagccacagtgtcctccctgtctcctgccacagtgtcctccctgtctcctgcagacacaccagccatgctgctgcctgatgacttcacacaggtctttccctctgagcatccccatggccagcaccctcttcgccttcaaattttttttttttttgctcaagaattacctcctccatcagatatcctgaccattctatttaaaacttcaaatctcccctgcaccttcagcactcacaatgcccaattcttacctgttctacaatttttctaatgcatcttcttttctaacatacaatatctatctatgtatctctctctctctctctctctggtcttgttgcccaggctggagtgcaatggcatgatctcggctcactgcaacctctgcctcccgggttcaagcgattcccctgcctctgcctcctgagtagctgggattacaggcatctgtcaccactcctggctaattttgtttttgtatttttagtagagatggggtttcaccatgttggccaggctggtcttgaactcctgacttcaggtgatctgcccatctcagcctcctaaaatgctgggattacagaggtgagccactgcacctggcccactctacttttttctatgttgtctcgatatagatctcttttgcttagtatctttatatgctaagtttcaatatgaaccttatgctggaaactgcaagagaaaaagtctatgaaaatccatgactcctatcattttccaggagtaagcgtgacccatgcctagtactcacagttaaaggaccatctttaaattcttacctttaggacatgctttactgttgttgagtcatttgatttcaaaagaccagtcacatttttagccagttcctcatgtacagtcctctccttgcatgccctggtcttgaacacgaactgaagaaaatccaaaaagtgaataaagttaaatactttgaaaaatgaagcttcaaaaactatgtcatgtgaataacttatgtctctaaattatctgctcatgccagattttgccatgagataaatgcaggcccaatgataagagcagtacacacctgttcctatttagggctttgcagaagtagggccttgctcacctaagctctccttgaaactctttgtagaaatcaagagaaagagccagagagccatttagcacgttcaaggaaacatggagggctttgacccacctacttaggacacattccccttctccttcctccactggtaacaggtggcatggtagcaattcttcatcctgaaagggtagagcacccactcaaatagccaagtggggaagccagtgccttccagatgccagtacgtgagctccccacaagcccagggtctatgatcccatgcttagacacactatcaaggcgttcatgaacattggccatcagtaagataacaaatgctgcatacttattttttttcctcaaaaaattggttttggcatgcaccactgagggcacataatggctagttttcagtatttcttcatctcttaagaatatcagtatcaatttatgcacatacataaagttcaaatataaaatgcttattactgaattataatatttcacttatgaattgggtttgcctcgtggaaggacatttcttcataattttcacaattcggatttcaccgtaattgagagtgaaggcaggaaagagaaggaatggcttaatgtagaggcacattagcttttggatctgtaactgtttctttaaactttgtagcacattggcacctaacttgtcatggtgggatttgacttctccaagctcatctcaaaggagaaagatgaagttaatggatgcatgaaactagataaaatcaagagtaatacaatttttccctctcatgggttatacctcagatgtgagtaacgtcatcatcaatgagctcatgccatgcacagttatttagcctgaagggcatttaaactggcactgaaatattcttattttaaaattttgactgtaacccatcagtgctacaaatcactgttaaccatggcatttaattagactggctttagacacgcatctttgaaaaagacacggtgtatgtgtgcattttgcatattgtagacgaagtgagttagcagcatttagcaccactgaacttgaaatggtgtttagataacttctaaataaatacaaattgtattgaatatcacatctttggaggacattcaagcacgcactgtaacaagagtccaatcacaggatgatagaactgaatgttcctttggtcatttcatctcatgtcacaggagaaaactgaggttcagagaggctgactgcttaagtctagaattgactagaatctagtctcttacttgccagcttagtgttctttcccgagtaaaatgcgagttgattacatttattaggaggtatttgttttagatatgttaaaatttattataaaattgttatcagcctaaaattccacataggtgtatttttggatttgaatcacttaaagcaagctaagtagataatctcctgtattataaagtgagatggtcttgttgggtatttcagataccctggttaaaaataaaggtcacgccaggatgcatttctaatgcatctctccaggagcgtcaccggtagaaagtctgagatttgaggtattcacaaagagctagccttggtaatcacaaaaatagtcacaacaccggaggggtcttaatgtaattttcaatgatcccactgacatgaggaaaataatatgtgttgaaatggagatgcctgtgtgtaagatggatcagtaactttttttctctttctcagtccctttaaggattgaaatgaaacattcgggtaatgaagcattgagagggtgaaagttctccaggtgattctgttgaatggtaaattcatcgatactctataaaactaagctatgaccctatcttagggagcaaactaaaaaggcttgtgtaggtggaactggctttttgcagttgagatgtggatcttattgggtaaaattatacaatagagaaattattgtgaaataactatttttggcatatagcctatgtttaaaaagggcacatactcatgctttggcatttgggaagacaactaacatttctggcagatagaaaacatatggatataaaaactgtaatgaaaaaaatttccttacagatggtatctcagaggggttcactccagaatgcaatttctggttacttccttttatgggagtgtggaattttttttttttttttgagatggagtcttgctctgttgcccaggctggagtgcagtggcacaatcttggctcactgcaagctctgcctcccgggttcacgccattctgcagcctcagcctcccaagtagctgggactacaggcgcccaccaccacgcctggctaattttttgtatttttagtagagacagggtttcactgtgttagccaggatggtctcaatctcctgacctcgtgatccgcccgcctcggcctcccaaagtgcttggattacaggcgtgagccaccacgc

SEQ ID NO: 974 - DNA, 202 bp, Homo sapiens
ttctttttttttgagacggagtcttgctctttcacccaggctggagtgcagtggtgcaatctcagctcactgcaagctccgcctcctgggttcatgccattctcctgcctcagcctcccgagtagctgggactacaggcacccaccaccacgcccggctaattttttgtaatttttttttttttttttttagtagagttggg

SEQ ID NO: 975 - DNA, 3241 bp, Homo sapiens
ttttgatgatgagctcctagcttcaaagtcaggacccagcggggctccacgaaagcctgggcgacccagccactgggcctaagcctgacctgctgcacccctgcctccctccacagttgccgaggtactgtctgaatgccgcctgctcgcctacatatcccaggtgcccacgcagatgtccttcctcttccgcctcatcaacatcatccacgtgcagacgctgacccaggtgagaggccccggcagacacacagcagggaaggtcgattggaaaccacttcctttgtcctggtgcccagcaggtttctgtcccccactccagaagtgcgtctctggagacccagctcttctgaggactgtgctcaggaggaatcagtgtcccattgtacagacagggcctaaggaaggagggctcgcaagtgccctcaggtcacaggctgacttgcaggccagtgctctccccgcctcccccatgtccacgtccctcacaccttctgccctgctgggctttggaatcggacctgaggctgcccaactccctcactgaatagtcatgcagccttcccttctctgagcctcctgcccctcttttctagagtgagggtgatcttagcacctctcagaggtggtctttggttccgttctgaggtgaagcaccaggtgggagtgcatggtgagtggggcagaactctttccccaccgaggcgcgcaggctagtgctgaatggcacttctgaagcgggataaccgccccaacacacgcacccagccctgcctgggacggaccttccggaaggagtgatgcttgagcccaggtctggacagggacaggtgttgttgcctcaggtggggtgggaggtgggcgtggggaagaggaaggtgctcagtcaggaaactggggctgctgggggcccccttcccccagtcctatctcacctctgtgcagggagagctctgtgggtggcccgaggcctggggccactctcctccctgcctgatggctacccaggttcaccaggggccactggggctcccaccagcccctgaccctgtgggcctgtggccttgcaggagaacgtcagctgcctcaacaccagcctggtgatcctgatgctggcccgacggaaagagcggctgcccctgtacctgcggctgctgcagcggatggagcacagcaagaagtaccccggcttcctgctcaacaacttccacaacctgctgcgcttctggcagcagcactacctgcacaaggacaaggacagcacctgcctagagaacgtgagtgccccaccctcaagggggtgatgggtgggccgcggacccagggcctctcagaggggtgtcccggtgctgggcttgacctgggtcctccaggcgccccccagcccctccttctttgcccagagctcctgcatcagcttctcatactggaaggagacagtgtccatcctgttgaacccggaccggcagtcaccctctgctctcgttagctacattgaggagccctacatggacatagacagggacttcactgaggagtgaccttgggacaggcctcgggaggctgctgggccagtgtgggtgagcgtgggtacgatgccacacgccctgccctgttcccgttcctccctgctgctctctgcctgccccaggtctttgggtacaggcttggtgggagggaagtcctagaagcccttggtccccctgggtctgagggccctaggtcatggagagcctcagtccccataatgaggacagggtaccatgcccacctttccttcagaaccctggggcccagggccacccagaggtaagaggacatttagcattagctctgtgtgagctcctgccggtttcttggctgtcagtcagtcccagagtggggaggaagatatgggtgacccccaccccccatctgtgagccaagcctcccttgtccctggcctttggacccaggcaaaggcttctgagccctgggcaggggtggtgggtaccagagaatgctgccttcccccaagcctgcccctctgcctcattttcctgtagctcctctggttctgtttgctcattggccgctgtgttcatccaagggggttctcccagaagtgaggggcctttccctccatcccttggggcacggggcagctgtgcctgccctgcctctgcctgaggcagccgctcctgcctgagcctggacatggggcccttccttgtgttgccaatttattaacagcaaataaaccaattaaatggagactattaaataactttattttaaaaatgactgctgtggacctggcttttgtccctaggactgtgtttttcctcctgaaccccaaagaaaagaatgagaaggaaactggctgtggtgtttattcagggcccagggaaggctgaaggcagcagggggcgatgcagagatggcaggatcggggcaggtggcctcagccagatgtgcaacagcagacattcctctttagagcccagggggtcaggccgtcactccttgtgctgaggagaaagggatagctgagtgagcagtactacctgtcagcccccacagtccccctgcacagagagcaatgcccctgccactcctcaccttggggcccagggcgtcccgggtccgtgcccgcagcttgttggcctgggtttccgccatgtctgcccgctcctccgcatcatccagctcgtgctgggccttgcgatacttggccaggttggtgttggcctgctgctcctgggggcacacacagggccttggttccgcttgggtgactgagatgcttattctggtccctgccccagtccaagaagggagctagctcctcctggttctcaactttgttcctattgccactgtccatcctcaccaataccacagcgggaataaggaagttgggacgcaccaacttcatgtgcctttttgtgcctgccccacccctcagaggcagccccagccttggccaggggaaagcacatggggtctgttccatgagaaggagctaggtctgatctccccagagatgttagaagcttctctcttccctctgggtcactgaccttggagggtggagctgctgctgatgcctcacctggccacagaccctggggcagagctggggtgcccggtccaggtgtccaggccccagcgcactcaccgcctcctcaaactggcgcttgtagctcttgaccttgctctgcagcttgtccaccaggtcctgcatgcgagccaggttctt

SEQ ID NO: 976 - DNA, 20295 bp, Homo sapiens
agggccatttgcgacttgaagagcggtccccataatttgctgtcatacatctgcctgggcacttcctgggggtctggttggtggcaggagaagggcataagcagggagggatgggtcatgttactgtattggctgtgtccgaatatttttactttatgttaaagttgatgaggcacaactattgcagagtccatttttccgagtctctgcgctcacctggctcctgggattgtggagggagttttgcagctttcagagtctgtgttttgggctcatggcccagccgaatggccatgctacaagtctgttcagagcaggttcgaggggcagaaacgtgtttcctcacaagctgtgactcaatcctgtctccggtggctgtgtcagcctccattgtgttccctcctccaggggcttctgaggagaatggcctgcctcacacgtcagccagaacccagctgccccagtcaatgaagattatgcatgagatcatgtacaaactggaagtgctctatgtcctctgcgtgctgctgatggggcgtcagcgaaaccaggtgggcccctctccagcgtctcaggacacggggagcaggtgctgcccgggtgctcatggtatgccaggtgctccactgggccttctgttagaatggctctcgctttagcctggcaaagcataggggtatttctccttctgttctacctataaggaaaccaggctgattccagaaccgggagtcttttcactgtgccttgctgtatggagcgtttctaggcagtcttggttggtgctgagggcagaagcaggcagttgcctctgtgaggtgaagactaaagagttgaaagctggcaagcctggccctgtggacatgctagaggagttgccaacctgatgtgggctcagggcagtgggacagagcccagagctgtgtctgcttaggaaaactgggcaagtacagggagctccagatgtgcaaggttccctgagccttgaagtagttccaagacggaggaggaggggcccataacctacagtggaggaaaaagggcttggaacagtgcggccctcctcaagactattgagaagtagccttttcctgcagaccgcgcccttctagggaggaaaccaagcatgggggcaggagaggctggaggctcagcagtccttccacatctttctgagtcagacactggactgtcacaagtctgggcaacagaggtgcagttacccccattttacaagtgaggatgaaaacgtccagaagagaatgaaagagtgtaccaggtgggagggggcagtgccctggggaggagtgtgcatagttgctggaacagtgaggcagcgcgggacagcctggagcaaacagccaggagaggagggctgagggctcacagggaccaggtcatgtcaagctgtcacaggccattttaaagactttggtttttactctgagtgaagtgagaagtcattcctctgactgcttttggaaagactggaaacagcaaggaagggaatagggcgaccattaggggccctcataatagggccaagagatgatagcagctaggaccagcacattgatggtgggactggtgggaggtggttgcattctggatatgttttgaaagataggatttgctgatggtttggatgtgaacttaagagtgaggagaggagttaagggtgactcccaaggtttttcgcccaaggaagtaggagaatggatttgccaggtattgaggtggttaagactagcaggtaaggggtggaggagcaggcttagggaggaagatggggagttgtgttttgtacaaggtagatttgaggtgtgtgttagaattgacacttggattgattacctacacctggtgttggggagatggcaaggctggaggtatcactttgggagtcctcagcatatggttgtatttaaaaccaggacactggatgagatcccacggtgatagccacagcattggtgtcccttccttcaatacggaacatgtttttaataaaaaataatagttttagggacagcttttatgcattgagtgctattacttttttgaggcactttcgcagttgcttatatgtgaaataattgtagggacagcttctgtgcattgagtgctattactttttcgaggcactttcacagttgtttgaattttcaggtatttagtaagttacacaacaggtggtgactctgtgtccccacactcgattcttgagaaagccagggcataaactgggctgtgcgctcaggggacaggcctggatagagccaggatttaaactctgctgccctgtctcctctttctgccctctcacagcagttctctgttccctgagccttcttgttgccaggttgctatgagttgttgcggtcttgagttaaactgtatgattacagtgctggttccttgggaagggaccactaatgaccttgaaatcctggccccccaaaaccactgtttcactagcgtgttctcatttgcacagtcagcatttcctgggtttctgctgtgtgccgggcaccgtgaggatctggattcccagatcctgcctacactgggtagcaaggggaagggtttccttggccaggcctcacagaaggcttcctccttaaagaggcctcctcgttaatgagcagttgggccaagttctcagaccaatcttggccaaattgaaatctcaggactggaaaggctccccatgtgctgtcaagtttcatccctctggtgctaatgaaaaccatccatatagcagtcgtttcttttagtgccccctgagtagcttctacagtacctcactgagccttttcaacagctccatcgtcccccatcgccttttctatcaagggacttgggttcaaagaatgttgcccagggtcacagagctatcttgtgaacccagggctgtctgactgcagagataaatgcctgagcctgtacccgctgcctcctctggtagagtggcacttcatctcgcccacctgcctaccatcctgctatagagcaggctacggggctggacctgagagtaggaataatgcattctacaagtaaaatttgttttacaaattttacacatgaagaagctgctattttctttctttcttttttttttttttttttttttctttttttgagacagtcttgctctgccacccaggctggagtggtgcagtgacatgacctcggctcactgcaacctctgcctccccagctcaagcgatcctcttgcctcagccctccaagtagctggggttataggcacacaccaccacacccagctaatttttgtatttttagtagagacagggtttcatcatgttggccaggatggtctgaaactcctggcctcaagtgatccgcccgccttggcctcccaaagtgctgggattaacaggcgtgagccaccatgcccggccgagaagctggtattgttaagagaaaagggaaatgatgtagtagaaacctcaaacctaagcactggcctgaacttaggagacccagggtcaggtccaagtctgccttagaaggcccctctcttcccagctgtgtgactcacccctaatctcttaagcttgggtttctagtctgtgcagtgaggcaattgcactggatgaatttttttgggccattgttggaacattttatagctgtgtgacctgggcctggcttagggccctttggagtgagacaggaaggcacatggcttggtgaacaccatagatgtcagccgtacctccccacccccagttaagcagggcaaggtagatccaggctgggttttagtaaaggcctgagtggcagaacaggtgtcattttacatcagcctcagtctaacagattctgggctgcttatgagtcttaacactggccagaggctgtgatttctagtaggaagagaatagtcacctctattactttcagtggcaaaaatcgcaattacttttacacaacctaatatgttgaaggaagaggtccatggaaatggaggctgccagggatgtctttgtcagcttctggtctcccaagataaatgcatacctgtagtgggctagaaaggggcagacttaagatctgaacacctgagttaggtgccgttgcaatcactgaccttacccaggctggtcttgctgaacttctcccccttgtaaaatagcaataagcgagcactggtgctgtgtgcagagctttacatctgctttctgactcgatccttacaacagccccgagaagggctagtaatagccttatgttatataaacaaattttaacagggaaatcattcctgcagttctgttttaaaagatataaattagtataagtgaagcctctctcccctctgatccttgacattctattctaatggttccatgaagcagctaattttaccagttattagtgtatccttctagagacatttttatgcttacaaaggcgaattgtattcctctttttttacacaatcagtaatacagcatgagcacacttgctttcccagtattatctctcggcaattgttcagttcacgacatataaaataccttgattcttttttactggtgccttgtatcccattgagtggcataccataatttattttggggtattacaaataatgctatagtgagtagtgttgtaaatatatatcatttagtgtttatatggatctgtctgagtgtaaattcctaaagtggaattgctggtttaaagggattatggatttgcaattttagagctactgccaaacactcttccctgtgcaggtcataccagtgtgccctcccaccaacagcgtgtgaatgtacccaatgcccaagtcaccaacacggtcttataaagctttgtcatctttcccagtctgaaaaagtgaaaaatcagagacatttgtaggactccttatagaggaatttctttgcctgtggcatgaattgccaatgtatgttctctgtttgtcatatttggcttgtgactttgcttgagttttgccatacagaatttttaaaggtttaggtggttgatgtcaacaagcttctttttgagcttctaggtttattataatccttcagaaaggcttttccaactcttagatcatttttttttctttgcagagatttttctagatcttagagttttttaataattgtatcttactttcagctgaaatttatcctagtgcaaagcatgaggaacattttgatgttaatacgaggagacaaatcttaaggaatttgtttaaggttacaaagtttgcacatggtaaagctaagagtcaaacccaggactcttgcatcccaaaggactcttgaatcatatgcaggactctctgaatcccaaactcatgcttctgtgataggaactaccggacattatgccttgtaggattattgtgagcattaatgagcaaagttagaaagtgggtttgtgtgtgctgggcataggggatacacggatgttttcttcagaccctggccctccttactgacagtactgatacttgtcctgaatatcattatcgtgtgtactgagcacgaggttttgctagatttttcaagcacatttgtcttaatactttttccttcctatcccattcaggttcacagaatgattgcagagttcaagctgatccctggacttaataatttgtttgacaaactgatttggaggaagcattcagcatctgcccttgtcctccatggtcacaaccagaactgtgactgtagcccggtaagcaggagacccccggggacagatggggcctcactggcttggagtagttgtttcaagacctgctgctgaccctttgaccttttttcctttgggagtagagcagaaactaaaatcatatcttatagtcccctaattggaagctaccttggagtaggatctgagtgaactccactccccaccccaacctatgcagaaatcccttttaagatcttcctaggctgggcacagtgactcaggcctgtaatcccagcactttgggaggccgagcgggcagatcacttgaggtcaagagttacagaccagcctggccaacatggtgaaaccctgtctcactagtgtgagagacacttgcgtctctcactaaaaatacaaaaattggccaggtatggtgttgggtgcctgtaatcccaactcttcgggaggctgaggcaccagaattgcttgaacccaggaggcagaggttgcagtgagctgagatcacgccactggactccagcctgcgtaacaaagtgagactgtgtctcaaaaaaaaaaaaaaaaaaagttcctgcctgaggccctctagccaacttccccttgtaatctctgtgatagggatctcatttcactccaggcaggggctgcccactgcatgagctagcagcctgcttttccttatttgctgttttatcctattgtaattttcatccacctatagaaccgtgctcccgggcgtggtggtcacacccgtaatcccagcagtttgaaaggccaaggcgggcagatcacttgaggtcaggagttcgagaccagcctggccaacatggtgaaaccccgtctctactaaaaatacaaaaattagccaggcatgttggtggggcacctgtaatccctgctactcaggaggctgaggtgggagaatcacttgaacccgggaggtagaggttgcagtgaactaagatcaagccactgcacatccggcctgggtgacagagcaaagacactgtctcatacaaaaaaaggtggctttggttttttgagcccaagcactctcctttagcttgtgtctctcacagtccccttgagagagctctgaacaggacattggaaggcttgttggaagagcttgaatgaatcactgaatctctgagcctctgttttcttgcaaaagaaggataatactctttcccctattggccccccggctagtcggcaccctgcctaccagcatgagaaggaaagtgctctgggacctaaaagtgccacccagccatcggcctggtgccatggggccctcttctcttcactgcactctggggacttccctcagcgacctgtcttctgctttatcatttgagtttttaatttcaagcaaatatattttgcatttctagatgttctgtctggctcaattcggaaactgcttagccatgatgttaatatcttttttctgctgcatattctgtttttaatcatttttaaaatactttcttaaggtctctttcgattgctcatggggcactaatgcttgtgtttgggtcttcagacctcagggtggagtgttgcctcgtgttttgtaatgtctgtggagcggccaccagaattgcttgaacccaggaggcagaggttgcagtgagctgagatcacgccactgcactccagcctgggcaacagagtgagactgtgtctcaaaaaaaaaaaaaaaaaaaaattctgcctgaggccctctagccacttccccttgtaatctctgtgatggggatctcatttcactccaggcagggagggggctgcccactgcatgagctagcagcctgcttttccttatttgctgttttatcctattgtaattttcatccacctatagaaacgtgctcccgggcatggtggctcacacccgtaatcccagcactttgagaggccaaggcgggcagatcacttgaggtcagtggggttagtttcccccttggatacctgtgtagcctcagccctggaggcatttctacagggcacttttgcttttgtctggcagctgtcccagggccagttttcttatttaatgtcttggccctactgccccagtcgtatgagcccagggtttctgctgctcttgggagggcccccttcacccaccagcagcaccatggcagagccaggctccctgggctggtgggtcaggcctttctaacccttctttcaccaagtgtacatgctccccaggctttactgggacctgacaccctgtctagtccctgcagggcattaaaacccaagccttagtgtgactaggtcttgtctccacctctccacactgcccacagctgctgagtatcagttccttggctcactattccaaactcctcggtcctttcttcatttctaactcctatggacttcccccgctcctccccacacgtgttgttttgtttgttggttggttggatttttgggacagagtctccatcacccaggctggagtgcagtcagtggtgcgatctcggctcactgcaacttccgcctcccaggttcaagtgattctcctgcctcagcctcctgagtagccagaattacaggcgcagcaactatgcctggctaatttttgtatttttagtagagacagggtttgccatgttgcccaggctggtctcaagctcctgacctcaagcgatctgcccgcctcggcctcccaaagtgctgtgattacaggtgtaaccaccacgccccgccttattttttattgagtgtgatggcatgtttttagcaggaagggggccacattagcttaatctgctgttgatcagatgtggaagtgaacagatggttttctaactaaagaaaagtcctcatggtacatgaggacagaggcttagagaagcaggctcccaccagagtgtctgcttgtgttattttggaaccttgtggctgtggtcctaacattgaggctgtgcatgtgtttcaggacatcaccttgaagatacagtttttgaggcttcttcagagcttcagtgaccaccacgagtaagtacaagagtgtccctgcaaggagagttgttgggctgtcttcggaaggcctcgatctccttgtctggtccctgacctcagctcgagaggaggccctggagctggtggaagcccactgtcccctcagtgttagcaggtgtgacactgcagtcggacctcccgtctttccagacttccttatggcaggcactgccccaagctttcttctaaccctcatagccaccccaggaactgagtatggaagtcgttggccccttactacctttggaatcaatggatttctcaacctactgcccctctaaagcaagagtggacagcgtggctattcccaggggccggcaggaacttcagacaggcaaagccgactgcttactgagcagctggaggattcttccctccacaaggaggtgtgctcccatttttcttgaaagacattctgcgctcatttattttttaaccttcgatggagaatgtacaaggaaaattactctctgctgtaaggaaaacagtgcaggaagggggtgactagcagctgacccttgaccttggcattggggaggtgatgtggggaccttagtgaacaagaatttcagtgagctcagctccagccagctgcgtgtgcacaggaaactgggcccactgttgcataacttctgattttttctgccaagcaaaggcagaaattaagatttatgtgaaaggtcctgattttaaatgttggtttaaatattttaaaaaccttgcatttgagctaacagaacatgcctggagacagctgtggccccagggcacctccatcatatgcacccatcctctgtgagaggttttccggctgaaagccatagaagggctccaggaagcatgttaaccttctgaaaaatggcaccacatatgttatggaactgtgctgttttccctgaggaagtgagtctctggctttcatcagactcttcagtctgagtactctgtgggatatcaggatgaatgcaaacagccatggcccctgctctcatgaagggcagagtctgaaaacagagacagttgttcatccaaggattccaccgttgagcattagtgataagtggagatggtattcaggaggagaggaacggggtctgtgagagacatttgacagggtccaggactggccagaggacactcaggaactctcccctgcagaagtggcttgccagccaagacctgaagtgtcagcttgtagtgaattgagtgaacaggcatgtgagagggtgtgtgttctagccagaagcccctgaacgagggaagaccattgtggccagctgatgggagtgatgtgggcttggctctgggctgggctgcacaggacgttgtgggtcacagtcacagggtgttgtgggtcacagtcacaggcctggattttatatacagatggtccacttagaatttttcaacttcacaatggtacagaagtagaattttgaattttgatcttttcctgggctcatgataaacagttcaatactcttgcaatgctgggcactgagctgcagctgcagctcagaatgtatttcaagaaaaatggtgaccagctacacgatcaccaaggtagacaaccagtactctgtgctgtgcctgccgtgttgccagtgattatggccaactgtaggctgaagtcagtgttctgagcacattccaggtaggctaggctaagctaggaggttcagtgggttagatatattaaatgtgttttctttctttttctttttttcaagacggaatcttgctctattgcccaggctggagtgcagtggcatgatcttggctcactgcaacctccaccttctgggttcaagcaattctacctcagcctcctgagtagctaggattataggcgtgtgccaccacgcccagctaattttttatatttttagtagagatggggtttcgccacgttggccaggctggtctcgaactcctgacctcgtgatccacccgcctggaccttccaaagtgctgggattacagacgtgaaccaccgcgcccggcctcaatatgttttcaacttaacggcattttcaaatacgatgggtttatcaggacataacctcctcctaagtcaggaaatgtctgttctaaatgcagtgggaagctgtggaagtgttttcaccgggagtgacaggatcagagtcctgattctgaagatcacttttggcaccgtgtgatgactcagttcctgtgggataccttttagtaaagggagctggtgtcctgggaacacaggacccagcagtgacaggcctggatggcaagtcgggggaagtgtcacagttaaccaggcctctgtgtgatgtgtgaccgtggtgcttggtgggactgctgcagcagggccaggcttgagtgtgattggacctgttgaggtgttggtgcctttgagaaaacaagtggaaatgtaggcaaagagaaaggcccagagctgctgagggaaggggccttgtcgatgaatgtggcaggcaggggtcggggatgggggtggggccagggagagattccactgcctgagagcccagagttccctcctgcaggtgctggctggagtgagaggtgctagaggaaagtgcctggtggcttctcagattctgtccacaggaagtgggcaggagactccctacactagcctggtgctgacccagcagccccagttcctgtcctttacctcctccaacccattttgtttcaggaacaagtacttgttactcaacaaccaggagctgaatgaactcagtgccatctctctcaaggccaacatccctgaggtggaagctgtcctcaacaccgacaggtgagtgcaggggtgcagcttttccctcagcccatcccggctgcccacgttccccgggggctcaccggtgagcacatccaggtatgcacgcgtgtcctctctcacatgcagctacagtgtcctgagggctcctgtgtgccaggcattgtattcatgtcacctgcattttctcattggagcctcacagcagccctaggaggggagccccatcagtacctgcacttgacagatgaggtgagcctcagagaggtcacctgccagaagtcatgtgtgctccgcactgccccaccgccttgtctcgtgcattcagcccctttgcttatgtgctcctttcttgcctggtggcatctgcagccaagcaggacagacagaagcctcttacctgctgccaagtgttaggttgcattacctgggttaggtttgcctcacctggagccaggcagtggggggctagtctcacaggcgtcagaatacagtggactttatccaacaagagccatgatttcccaaccttttttgtttgtttgttttgttttgttttttagacacaaggtcttgctctttctctcaggctgcagagcagtggtgttatagctcactgcagccacaaacttctgagctcaagtgattctcctgcctcagccgcccgagtagctgggactacaggtgtgcgccaccattcccagctagtgtttttactttttttttgtagagatggggtctcactatgttgcccaggctggtctcgaactcctggcctcaagtgagcctcccaaagtccagggattacaggtgtgaaccacctctcctggcctcccaatcttttttttctaaggtagcagaactcttcattcaaataaaattgtacccagtcctgccctgatgtctgcagtggatcacagcagagctgctctgtttgaagggcccagacccctgcgtgcctggccgtcttccttcccccatgacggggccagagtcatttcctcatctcctgcctttgcttcatagactgggaagctgaggcttggagttgtggacacttgcccaaggccagctggaagtgaacctcaggcacggagtacgctgggcctcaccctattggcagagtctttccccatctggcagactggcatgacctgtttcaacacacttttggtataaacagctctcctctggcagttctaagccatgtctgattctggatatgtttctggcctgggaaggaaagctggcctgagatgtggtgggaatgcacttggcagtttaattctgtggctgcaggggtctccggggctctggacccagttggagcaggaaggcatcctgcagacttggaaatgtccccatggtttttcaccgcctaagccagcagaatgacccatccccagggcccctgtcagcctctcagatctgtcaccaatatctctcttctatttcaggagtttggtgtgtgatgggaagaggggcttattaactcgtctgctgcaggtcatgaagaaggagccagcagagtcgtctttcaggtgagtctggggaaaagtacctgccgattctgcggggctgcagagccaggtgtttctcaggaggttaggaatacctcctttagtcaccagcgtccatgcctcctgaagcacaattactgttggggagaggtggtttgactgccatcttgtgtagttttgactcgacaggtatgtgagagcttcttctgcagcccacagtgaccgagcattcaccaagcacctgttctgtgctggtgccttatgggtgggagagaactaggatacgggccctgccatgaattccctagagctgtgctgtttcaatgcagtgtgggaaggaatggagccagggttggcccaggagctatagcagcaaaggaaagcctcttccgctgctagggctgggggctgggtgaatacagggagaccttctctgaggtccttagatacatctaagatgagtcttgaagtcagtggacaggtagagttccatcagggccgggcgtgagctgtcaggaggcttcatgcccacatgggcctttgtcacttcagtgccttgtccaaactccctgtcgtggatacccgctgtgccctctgggtccctcggtcagcatcaaccactacttccctaggccagcccatcgtctgtgagcccagtggcctgtctgcatgtgttcgtccgcttcccacacacattcctggcccctcaattgcacgtcctcccattcttgtgaaagggcaaggcctagagtatgtttcacgggggctcgcaggagccagcccttcgatcccagatgttaccctttctgtgacacagccccttccagacagacccagatagaagacttctccactgagctggctctctgtgaggatgggggcactgctgtgtccccaggcccaggatgaagcctgatgcttggtagatgttcagtaaatgttgagtacatgaaaaggcaacaaacatctcccaaccccttggagaactgaacatgggccggaagagggcagccttagccacctgagccagtatttgggtcgcaggttttggcaagctcgggctgtggagagtttcctccgagggaccacctcctatgcagaccagatgttcctgctgaagcgaggcctcttggaggtatgatctggagcagccagtgtcttgggttccgtctccccccagcccacgcgttgctgtgtcctgtcctgagccccaaacagttcatcaggagcagagcagatctcgtgacttccaaatgcctgtgcaggctgccttagattttgccctgggtttccaactgtgggttccccatgggtgcttacggggtgacaggtttagagggtggccaggccatgcaggagggtgacagtttggttacccagcaaggcattttgaccctgaagatattttgtactaaaagttaattttcctttattgaataatggtcttcagaaaaagtaaaacttagagcagaatggccaaagttataattggtctttcagattttttcatatggacaagaaactgacccacgaattataaaatccatgtggaaaagaattgatccaaatcaatgtaacttcaagaaaatgtagaaaactttataaaggagtaaattggctttattctcttgatgaaaactcagtattttggtgtaaactctatttaaacaatttcgttcataaacacaaagacaaaccatggggtcaaaatgtgtcctttgcttttaaattctgtccttcatttacttgaatgacctcagtgcttaggcagtggcctgtgttttagacctggtgatgacagctcccctcacctaggagctgagcaccccggccatcttggtgaccacagagcaggtcacaggcttcagctgtacgccctgggcaggggagagattgtgctgcattcccagtctgctccacctcctggtgaggtctgtcaggcctggtcctgtccttggagccaccagcatcctcagacaagaatctagacagtgttgccagttccatccccaggatgcttgctcaaagccaatgcatggtctgagctccatgccaggccctggtgggggcagccacgttgacaccttcaccctgtccctcctcacccagcacatcctttactgcattgtggacagcgagtgtaagtcaagggatgtgctccagagttactttgacctcctgggggagctgatgaagttcaacgttgatgcattcaagagattcaataaatatatcaacaccgatgcaaaggtaaagttaacccagggctctgtggagtgtgctgggttgtccagaagttcacctggagtcctggtctgccaggctttaggcacaggttttacgttagagacgacgggggagtctgggcagtctttggcaaacattcattggaacctgctctgtctggctttgtgctagaccctgggaatgcagggatgaaaaccggggctgcttgtgggtagggagtgagggtgggaatgggtggcttgtgcgcctgccgtgacgcagcatggtgggtgccacggtgggagccgctgtagggagggactgggcctggtgtgttaggctcaccgagtgtgtgtgacagaaacccagctcaggctagctgaagtaaaattaaaagtaaaaattaaaggaatccagcacccttgagcgtaaaaccactggagagagtgtcggatctgtgctgaattccggggagtgcctcttagtacctgggtggtgaggggaggtccctcagcttatctgagcctctgtcttcctatctgaagcagtggggctggtagaggtcgctgatgccccttgtagtgactatccccccgggccatggccatacctggccagcagcccactgcctgctgtgagcttggtttctgtatagttccaggtattcctgaagcagatcaacagctccctggtggactccaacatgctggtgcgctgtgtcactctgtccctggaccgatttgaaaaccaggtggatatgaaaggtacatgaaaggcaggctgtcaaggcaagtcatgcagggtaagaatgctggcatcagacaccctgtctccagcagggagacaagaatgactgagggagctgcaccagatgcccacgtggccggcctcaaggtggcggcttccagggcaattggctttgctgccttgttcaacactttaataaggtgaaaatccattgttgctagcaagatgcaaagaaaaccagaaaaagaccttcctcttctgggctggtattgcctggcacgatgagttggccccctcgtcctcagtgtgctgtgcgtggcatcgcaggtgccctgtggtgcagcaggcatctgaaccctcctggacttgctaacgcacttccatgtgtatgcgcacgcgtttcctttttttcctaggagagggcttgtggcatccagcagattctcctgagggtttgtgacccccccacacccccaaaaagtcaggcacttgttccttgtcacggtcactgtcattgatagcaagaagtatcccggttgttggtaatttagccgtttgcttcctttttctgccccagagggtctgtttcaggggaacagccacacagattttggtaccttcggttattgccctgcctcccagttgtgcgggaagcagttgctccgacactagtggacggagcagaacctgtgccttgtggtctcagcactgggccggactcacctgagagctggtgtggaaaaccagttgcgctaggacctctgcagaaggagtggaacttttgcgttgtttttcttaatgcagcgtcatggatccatcttcctgtggagggaactcttctgtgtgtgatatggagggcacgggtctggagccagtctggggagggctgagggagagctgccctgagcttggttctggaggatgaggtggggtgctcctgggcactctgagaacatggctttgcctggtagcaggacagctggaggtccttctttctgccacagtcagctttcgttgaagctgttttgatgatgagctcctagcttcagagtcaggacccaagcggggctccacgaaaggcctgggcgacccagccactgggcctaagcctgacctgctgcacccctgcctccctccacagttgccgaggtactgtctgaatgccgcctgctcgcctacatatcccaggtgcccacgcagatgtccttcctcttccgcctcatcaacatcatccacgtgcagacgctgacccaggtgagaggccccggcagacacacagcagggaaggtcgattggaaaccacttcctttgtcctggtgcccagcaggtttctgtcccccactccagaagtgcgtctctggagacccagctcttctgaggactgtgctcaggaggaatcagtgtcccattgtacagacagggcctaaggaaggagggctcgcaagtgccctcaggtcacaggctgacttgcaggccagtgctctccccgcctcccccatgtccacgtccctcacaccttctgccctgctgggctttggaatcggacctgaggctgcccaactccctcactgaatagtcatgcagccttcccttctctgagcctcctgcccctcttttctagagtgagggtgatcttagcacctctcagaggtggtctttggttccgttctgaggtgaagcaccaggtgggagtgcatggtgagtggggcagaactctttccccaccgaggcgcgcaggctagtgctgaatggcacttctgaagcgggataaccgccccaacacacgcacccagccctgcctgggacggaccttccggaaggagtgatgcttgagcccaggtctggacagggacaggtgttgttgcctcaggtggggtgggaggtgggcgtggggaagaggaaggtgctcagtcaggaaactggggctgctgggggcccccttcccccagtcctatctcacctctgtgcagggagagctctgtgggtggcccgaggcctggggccactctcctccctgcctgatggctacccaggttcaccaggggccactggggctcccaccagcccctgaccctgtgggcctgtggccttgcaggagaacgtcagctgcctcaacaccagcctggtgatcctgatgctggcccgacggaaagagcggctgcccctgtacctgcggctgctgcagcggatggagcacagcaagaagtaccccggcttcctgctcaacaacttccacaacctgctgcgcttctggcagcagcactacctgcacaaggacaaggacagcacctgcctagagaacgtgagtgccccaccctcaagggggtgatgggtgggccgcggacccagggcctctcagaggggtgtcccggtgctgggcttgacctgggtcctccaggcgccccccagcccctccctctttgcccagagctcctgcatcagcttctcatactggaaggagacagtgtccatcctgttgaacccggaccggcagtcaccctctgctctcgttagctacattgaggagccctacatggacatagacagggacttcactgaggagtgaccttgggccaggcctcgggaggctgctgggccagtgtgggtgagcgtgggtacgatgccacacgccctgccctgttcccgttcctccctgctgctctctgcctgccccaggtctttgggtacaggcttggtgggagggaagtcctagaagcccttggtccccctgggtctgagggccctaggtcatggagagcctcagtccccataatgaggacagggtaccatgcccacctttccttcagaaccctggggcccagggccacccagaggtaagaggacatttagcattagctctgtgtgagctcctgccggtttcttggctgtcagtcagtcccagagtggggaggaagatatgggtgacccccaccccccatctgtgagccaagcctcccttgtccctggcctttggacccaggcaaaggcttctgagccctgggcaggggtggtgggtaccagagaatgctgccttcccccaagcctgcccctctgcctcattttcctgtagctcctctggttctgtttgctcattggccgctgtgttcatccaagggggttctcccagaagtgaggggcctttccctccatcccttggggcacggggcagctgtgcctgccctgcctctgcctgaggcagccgctcctgcctgagcctggacatggggcccttccttgtgttgccaatttattaacagcaaataaaccaattaaatggagactattaaataactttattttaaaaatgactgctgtggacctggcttttgtccctaggactgtgtttttcctcctgaaccccaaagaaaagaatgagaaggaaactggctgtggtgtttattcagggcccagggaaggctgaaggcagcagggggcgatgcagagatggcaggatcggggcaggtggcctcagccagatgtgcaacagcagacattcctctttagagcccagggggtcaggccgtcactccttgtgctgaggagaaagggatagctgagtgagcagtactacctgtcagcccccacagtccccctgcacagagagcaatgcccctgccactcctcaccttggggcccagggcgtcccgggtccgtgcccgcagcttgttggcctgggtttccgccatgtctgcccgctcctccgcatcatccagctcgtgctgggccttgcgatacttggccaggttggtgttggcctgctgctcctgggggcacacacagggccttggttccgcttgggtgactgagatgcttattctggtccctgccccagtccaagaagggagctagctcctcctggttctcaactttgttcctattgccactgtccatcctcaccaataccacagcgggaataaggaagttgggacgcaccaacttcatgtgcctttttgtgcctgccccacccctcagaggcagccccagccttggccaggggaaagcacatggggtctgttccatgagaaggagctaggtctgatctccccagagatgttagaagcttctctcttccctctgggtcactgaccttggagggtggagctgctgctgatgcctcacctggccacagaccctggggcagagctggggtgcccggtccaggtgtccaggccccagcgcactcaccgcctcctcaaactggcgcttgtagctcttgaccttgctctgcagcttgtccaccaggtcctgcatgcgagccaggttctt

SEQ ID NO: 977 - DNA, 188 bp, Homo sapiens
tctgcgtgatagttcttcaggttcacttcacagattagctgacacttaactgttctggaagctgggccaaggagtgctaacatggaaattgagtaactatagttttttgcccaaggtacaggagaataaatatgagtagatagaatctcttaaattaaaaatttctccagtaaatttttcctaagtct

SEQ ID NO: 978 - DNA, 3291 bp, Homo sapiens
tttttttttttttttttttttattaaatggtattgcttttgtttgcaggtctttttgtttttgttttgtttttgaggctgactgactgtcctagttgttgtgtgtttgtaatttttccacatcttattttgagcagctttgggtggtaaagttattgtttacaaattgaagcaactgattctagtggaacaaatgaaaaagaaacagtcaagcacacaatagtgcaaagaacgttcctttgtagatccgcaacttaaggattttgttcctcataaatggcatagttgaaagagcttatacactgcttacccagccaaatgctttgctttgaagtattgggttctgtgaaaatattgagcattgtacttaccttatctaggctgtgaaactgtcctacataccagagaatcataaaaacaaaaacctcactggcagcaagctgccgaataacaacagagtctagaggacatatttgtgggctgcacagatattttaggaatttcagaaattagaacaggagccaaaatgatttacattggcgttggcactgattcctttaaatggtctgggaaagggggttgggaagaggatggagctcaactggccagaagaggagcagctgcagtcctgatagcttctctagcctcggtcttttgagtgataagtagtcatgttgttttcatccagttggtttcttgtcattcccaagaagaatctcccaggccacatctttggggataactgacatactggattagccttttcaaaagaaaagtcatcctatttggttttatggggtgtgagttttgtgtgtacacacacagaaacatgtaaggtggtttgggtcatgtttttaaccacctggcaatacagtccactttctggtttcttttattgtgggaagtaaatggtcaagctgctcaggcagtgaaaagatgtggagaatgtccgttgtcattcttgccactgtattccatttgctaccgagatataacattaaggtggacacattttctaactgtattaattaaaagtcaatggatacagagagtggattttctccccaagtcccatccctgctgaagaccgcttggatgaactccccaacccactgtgcccctcccgcaacactaccagtagactttagaaccatagttaactaagtcttttacctctgagatacttaattctgggaaaattggtgacaattttcaacttctaaataggtaactcgactgcaaaataatcaaaactgataacaatgaaactgcggctcttaaacaaagccatgcatgccgtgcatttgtattgaaatgtctccatgatatgaagccaaatattcaatgtaacatacttaatatccaaaggtggaaacaaaagaatgtagagatccagtgttaagagttccatttgcttcaattaattatttaccttcctgtggaataatatatatatatatatttaatagaaccatagatagactagtagaatttagattataaatgtgtgagtgcagattatcctgctattgcacaagctagaggggggaaaaatctcaattccagctggcaagatgctagccaggacacatataagaaagttgcactagattgaatggtcacagaatcggaggacatggaagaaaaaggaaacttcggtggttctgcagcagacatgggctaggtcatatgtggtttctatgagttcgtgtctcaaaaaaaaaaggagggggggcatctgtccccggtggagctcacctatttggaatatggggcatttgttttttccactgcaatgatttcagtctggtttcatcatgttggaattcgatcacaccattttcaaacaatgttaacatagtccagcttttgtttttctcatctcttctgagaggagactcactgtttctgtctgaggaagctcataccctcggcaaaacatcaggacaaataaagagaaatgggggtacgcattcccaacagaagcagtgtgttatttgttttaaaactctgaacagagatcttggaaatctttcaaaaagaccattgaattcttcattggctgagaacgacgttttaaaatgtcttaaataaggctttgtttgcattgtttgagttcaaggggccttattattgaatggaattgcacaagcctttctttgtgcaatcaaaccattgttattggtagttctgtaaaggaaactgtggaatcgaattggcagtggagtcataaatctatttactgagtgtggcttccaagaaatgttgcaattcaaaatgcactaagtctgtgatttattggagatttggagattctaaataatatttttaaaaaacttccatgcaacttctggtttaatgtttggcaactccacatgataaaaaaataaaaacagcccaaccgagtttcggaattaagtattcttctagtaagtgattcaaacttgtaatatttgccacaggactgacttatttatttactagctagaagctcttaagttcacttgtttatcagggcatatacagaagggtttgttaaaactcgatgttaactttacaactttctgacctggtgcatgaattctcaagtactgtatttcactgtgttggtgtgtctgatggaaatttcgaggtggtcccacaaaaatattttatgtagtgtgccttcaaagagaaccatttatttctcttcacttatcgtcccacaaagtcacatttggtggtggtcagccaagtcgcatctggtctagttttactcttgtcccaattttaaagagaaatgggaatgagtttgccctggtgagacccataccattgcaatgattatcttgagcacttaaagtccagtgttggctgttagtgtatttgatattctgcctgtctcctcatggttgaaatatgtctgaagaatagcagcataatctcttggctgtttatacttttttaaactttcctgtgttgtaaatattgtatacttttggtgattccagctatgtaacctctatgctctgtaaggtgattatttgtatatagcaacatggcccagtgatattatatagtttcccaatggagaggttattgagtaacctttgcattagtttaaacactaccagaagaatgctgagccaactataaacactcaattttgtatgttttccaaattgtacttattactgcttttgatactgtattacgtgccaatagtttcccaatcacatagcaggcaagagatattttgtactttttgatccactgtaatatttaataaaaaatgttactatctgtttccttt

SEQ ID NO: 979 - DNA, 3291 bp, Homo sapiens; identical to SEQ ID NO: 978

SEQ ID NO: 980 - DNA, 92 bp, Homo sapiens
ctcactgcaacctccgcctcccaggttcaagcgattctcctgcctcagcctcctgagtagctgggattacaggtgcgtgccaccacgcccag

SEQ ID NO: 981 - DNA, 7852 bp, Homo sapiens
agattaatcctaccatatgaaagatttattaaaggagaagaagataagcccctgcctccaatcaaacctcggaaacaggagaacagttcacaggaaaatgagaacaaaacaaaagtatctggaaccaaacgcatcaaacatgaaatacctaaaagcaagaaagaaaaagaaaatgccccaaagccccaggatgcagcagaggtgagttgctttgctccatagaaatacctctggaagacatgtgctgcctcgaggtccttctggagccctgaatccacagctgtgtccctgcacagttggatggcttgatgaagaaaccaagaaatctaagcttcacagttccccacatagttccccagttcctgaaagcctttcagcttgctcatgagatgaaatccaatgcctagtattgaatgagatagcccaggaatagaatctagaaagatacaaacatcctgtagaaaactgatagcaaatgctcaggcttcaagagaaaagggtccagagccacactaacatcaaagaattttactgtgaaaacatggcttcttggccgctccacagcccgtctatctgaggtgctggtgcgactttaaaacatattttggggctggacatggtggctcgcgcctgtaatcctagcactctgggaggccaaggcaggtggattgcttgagcccaggaattcaagaagagcgtgggcaacatggtgagacccagtctctacaaacaaagctcacacctgtaatcccagcactttgggaggctgaggcgggcggatcacaaggtcaggagatggagaccatcctggctaacacggtgaaaccccgtctctactaaaaatacaaaaaattagccaggtgtggtggtgggcgcctgtagtcccggctacttgggaggccaaggcaggagaatggcatgaacctgggaggcagagcttgcagtgagctgagatcacgacagcctgggtgacagagcaagactccatctcaaaaaaaaaaaaaaaaaaaaaatatcaggcatggtggtgccccgctgtggtcccagctactcaagaggctgaggtgggaggataaccagagccctgggaggtaaagtctgcagtgagctgtgattataccactgcactcctgcctgggtgacagagtgaagccgtgtctcaaaaaaaatgctttggaggtccaggaaaggggaccttggaactgtggtgctgtatcctgcaagactctcctgaaaactttagagaagtgtttgtctcccataattgatttctgtgcaacagccatgggttgagaccaatttaagaaaatcttaagtgtggccgggcgcggtggctcacgcctgtaatcccagcattttgggaggccgaggcggtggatcacgaggtcaggagatcgagagcatcctggttaatacggtaaaaccccgtctttactaaaaatacaaaaaattagccaggcgtggtggtgggcacctgtagtcccagctactcaggaggctgaggcaggagaatggcgtgaacccaggaggcggagcttgcagtgagccgagatcaggcccctgcactccagcctgggtgacagagagagactctatctcaaaaaaaaaaaaaaaaaaaaggaaaaaagatcttaagtgcatattatttataggggaattttgaaatggttcctatgaaaccattattatttttcatattaacaggtagtttctgcactttttaagcccccaacagccttttggtagaagccattacccccagcatgtagccagtcatgtaggctgatctgggctccatttcaacatgaataataaaaaacgctgctgcccattaaaaaaaaaaaaaaactgagcagccacatttggagacagcatgttctaggattcaaccccagagggaattttgatgctgatattaaataccccctaaaaaatcaggtttataatgaacacataagaggctccataattaaacactggtttaaattgcacatgtacaacacgcaccaacctcccatctagacatcaacttacccagctgactcttacataagaaaatagtattgataccaagattagaaatttgtgggttttttgtttttattaggtttcataattattttaagctctagtaactaaaaagggggaggaggaagaagatgatgcagattttttttttttttgagacagagtctctctctgtctcccaggctagagtgcagtggtgcaatctcggttcattgcaacctccgcctcccaggttcaagcaattctcctgcctcagcctcccgagtagctaggactacaggcatgcaccaccacacccggttaatatttttgtatctttagtagagacagggtttcaccatgttggtcaggctggtcttgaactcctgacctcaaatgatcctcctgccttggcctcccaacgtgctgagattacaggtgtgagccaccgtccctggccagatgatgcagatttctcaacatctgcaagcttgcaacataaatggccaaaagcaaggaaattccaagtgcatgcttacattccatttttccttgatacttttggcctggtgatttattatagggtttcagatgagtgtgttctattagctgccatatgtacacaaaacaccaggggacaaactgaggaccaaggggacagctgaccgttgaatatctccaatttggggattaagtttgaaatggttggtttgtgaatggtaggaggaatctttagcctatgcactgagcctgtcagcttggatgatgaccatgcccaagagtggagccttactccctggagtccatagaaaccctgaaagctgttaggctttgtgtttcctgtaggctgcaactgttcccttcagggagctgtaagtgtctcaggttttgaaagttgtcatgatgaggttatctaaacctcatggaatcttccaccctctccaaggttgaccttataatacgaatcacttctcacctccaacatagaaccatgttattagccaggtgtattttttctcattaactctatttggggtttttggtttggattttattgttttcatcgcttttagtttttggtgttttcaatatgaagcggtgaactcaatggagatacaaagggtgagaaattccctctagttgaatccactatattcaagtaatgggattgcaagttgcatggtgggaagctaacatttaacatactaagcagatcataaaatgtcttactagaaaaaaagtcctttacttttttctgcctagctttcaaagacttcctaaacctgttttacaacccgaagcatgggactctgatataactgcagttctacatcatagaaacttcaatgagactgagtatccctcattgccctgcgtcaaactatagccccataagaaactaacaattagatgcaatttgcctttttcccttgccatactcatttgtctttatttttgtgtcatgtataagctcaagagaccaatgtgatgattattaatgtagaagaagtaatgatatttgtactggaaaaggcagctactagtacaaaaaataaaaagaaataatgatgataagcaaagtctcttaggtataacatgtccctaaaattcagggttttttttttaaagggatttaaggaaaaatacctgtgaaataggtgtgatttcttaaaacttttgttcccacgtattcctaaaccagcatcctcaatcttacccaaagatgctaattggcagacccacccttccttccttcctgcctgcctgccttccttccttcctttcttccttccttccttccctccctccttccttctttttcttttttttttttttttttgtgaaagttacactcttgttgcccaagctatagtgcaatggcatgatctcggctcaccgcatcctccacctctggggttcaagcgattctcctgcctcagcctcctgagtagctgggattacaggcacccaccaccacacctggctaatttttgtttttttactagagatgaggttttgccatgttgaccaggctggtcttgaactcctgacctcaggtgatctgcctgcctcggcctccctaagtgctgagattacaggcacatcttttcttaacagagaagaacaaagttcaagggatgagatggaaaaaggaggggaagaataccagctcagtacaactgttttgtgactgctctgctaagacatgtcagggcagaatgacagcagttttgaaagggcttgtcagtcagctgggtcatagatggaaagttaaaatgacctcctaaggtcaaagtttatatggctgcataatgcagtaaatgagtcgaattggtacccacaacttctgtcagtagggtcacataaggagtgtgtctgtctcattgactataatttatttcattcaacagcaaagctatatttgcggtggcactgactgtctgaattttgacaacttcattttgggctttaatagaaatgtagtttgctgcaacctagaaggacttagtctcctctgtccctctggtagacaggctgccaagaaatcttcatactttgtcaatattttagcattatctgcatatcatctggccctgagtagaaattattaacacttatgcattgctaatcttcagtgcatcatattgaatacattgggaagggatttgccctgttaaggaaagcagggagttgcaataggtttgttgtttgtcgttaacatggggttggttggatttttgaaagagaaatgctttaaaaaaatctttctcaggagtatcataaaacacaacatgtaatttaaaacccatttggataattgactgatttgacaagaagacaaccttagaattaaactatatattagaatcaaggagtgatatgattgtataccatcagtacataatactttgctattttgataggtatctcataagggactgaagcgaatatgcatatttcccctaatgtttctgtaatttagatttctttgtttagagccatgattggggagtaataaagctttacagaaacttcacgagctgattgacaagcctgttttcaagtaaaactgctgtgtggaatattttatttcatagcaaaacatgtctgtgtatttggttttcttctgactgtcttttgaaatatgttaccaggtttcatcagagcaagaaaaagaacaagagactttaataagccagaaaagcatccctgagcctctcccagcagcagacatgaagaaaaaaatagaagggtatcaggaattttcagcgaagcccctggcatccagagtagacccagagaaggacaacgaaacagaccaaggttccaacagtgagaaggtggcagaggaggcgggagagaaggggcccacacctccactcccaagtgctcctctggccccagaaaaagattcagccttggtccctggggccagcaaacagccactcacctctcctagtgccctggtggactcaaaacaagaatccaaactgtgctgttttacagagagccctgaaagtgaaccccaagaagcatccttccccagcttccccaccacacagccaccgctggcaaaccagaatgagacggaggatgacaaactgcccgccatggcagattacattgccaactgcaccgtgaaggtggaccagctgggcagtgacgacatccacaatgcgctcaagcagaccccaaaggtccttgtggtccagtcgtttgacatgttcaaagacaaagacctgactgggcccatgaacgagaaccatggacttaattacacgcccctgctctactctaggggcaacccaggcatcatgtccccactggccaagaaaaagcttttgtcccaagtgagtggggccagcctctccagcagctacccttatggctccccaccccctttgatcagcaaaaagaaactgattgctagggatgacttgtgttccagtttgtcccagacccaccatggccaaagcactgaccatatggcggtcagccggccatcagtgattcagcacgtccagagtttcagaagcaagccctcggaagagagaaagaccatcaatgacatctttaagcatgagaaactgagtcgatcagatccccaccgctgcagcttctccaagcatcaccttaacccccttgctgactcctacgtcctgaagcaagaaattcaggagggcaaggataaactcttagagaaaagggccctcccccattcccacatgcctagcttcctggctgacttctactcgtcccctcatctccatagcctctacagacacaccgagcaccatcttcataatgaacagacatccaaatacccttccagggacatgtacagggaatcggaaaacagttcttttccttcccacagacaccaagaaaagctccatgtaaattatctcacgtccctgcacctgcaagacaaaaagtcggcggcagcagaagcccctacggatgatcagcctacagatctgagccttcccaagaacccgcacaaacctaccggcaaggtcctgggcctggctcattccaccacagggccccaggagagcaaaggcatctcccagttccaggtcttaggcagccagagtcgagactgtcaccccaaagcctgtcgggtatcacccatgaccatgtcaggccctaaaaaataccctgaatcgctttcaagatcaggaaaacctcaccatgtgagactggagaatttcaggaagatggaaggcatggtccacccaatcctgcaccggaaaatgagcccgcagaacattggggcggcgcggccgatcaagcgcagcctggaggatttggaccttgtgattgcagggaaaaaggcccgggcagtgtctcccttagacccatccaaggaggtctctgggaaggagaaggcctctgagcaggagagtgaaggcagcaaagcagcgcacggtgggcattccgggggcggatcagaaggccacaagcttcccctctcctcccctatcttcccaggtctgtattccgggagcctgtgtaactcgggcctcaactccaggctcccggctgggtattctcattctctgcagtacttgaaaaaccagactgtgctttctccactcatgcagcccctggctttccactcgcttgtgatgcaaagaggaatttttacatcaccgacaaattctcagcagctgtacagacacttggctgcggctacacctgtaggaagttcatatggggaccttttgcataacagcatttaccctttagctgctataaatcctcaagctgcctttccatcttcccagctgtcatccgtgcaccccagtacaaaactgtaggctcagctctgcccagcagtccaaagcggcatggcccaccaagcttcactccttacccaggaggtgctgggcttatagagttagaagtcagtttttcttctaatctgagggtaagatcagtcccagcgtagggggccagaagggaggtgaacatgcctgatttttgtgggacaactctagcccacaaactgactggctggtgagtcttgactcccttccaacacagatgcccaggcacctccagatcattcacttcgcacgtgggccttgtgaagggatttgtgaatatccaggaagaacttagaggaccccatctgagttcggatggtcaggaaacaatctgggcaaaaaagaggcaggcatttcaaaggaaggggcaaggaagactggcaaacagatggcaagggatgcccctctttttcataaaactctccaaggttcaatcaatgcaatgtatagtgaaacttcaatagatctttcattttgacactattaaacaatccagagaagtaaacactgtt

SEQ ID NO: 982 - DNA, 7851 bp, Homo sapiens
agattaatcctaccatatgaaagatttattaaaggagaagaagataagcccctgcctccaatcaaacctcggaaacaggagaacagttcacaggaaaatgagaacaaaacaaaagtatctggaaccaaacgcatcaaacatgaaatacctaaaagcaagaaagaaaaagaaaatgccccaaagccccaggatgcagcagaggtgagttgctttgctccatagaaatacctctggaagacatgtgctgcctcgaggtccttctggagccctgaatccacagctgtgtccctgcacagttggatggcttgatgaagaaaccaagaaatctaagcttcacagttccccacatagttccccagttcctgaaagcctttcagcttgctcatgagatgaaatccaatgcctagtattgaatgagatagcccaggaatagaatctagaaagatacaaacatcctgtagaaaactgatagcaaatgctcaggcttcaagagaaaagggtccagagccacactaacatcaaagaattttactgtgaaaacatggcttcttggccgctccacagcccgtctatctgaggtgctggtgcgactttaaaacatattttggggctggacatggtggctcgcgcctgtaatcctagcactctgggaggccaaggcaggtggattgcttgagcccaggaattcaagaagagcgtgggcaacatggtgagacccagtctctacaaacaaagctcacacctgtaatcccagcactttgggaggctgaggcgggcggatcacaaggtcaggagatggagaccatcctggctaacacggtgaaaccccgtctctactaaaaatacaaaaaattagccaggtgtggtggtgggcgcctgtagtcccggctacttgggaggccaaggcaggagaatggcatgaacctgggaggcagagcttgcagtgagctgagatcacgacagcctgggtgacagagcaagactccatctcaaaaaaaaaaaaaaaaaaaaaatatcaggcatggtggtgccccgctgtggtcccagctactcaagaggctgaggtgggaggataaccagagccctgggaggtaaagtctgcagtgagctgtgattataccactgcactcctgcctgggtgacagagtgaagccgtgtctcaaaaaaaatgctttggaggtccaggaaaggggaccttggaactgtggtgctgtatcctgcaagactctcctgaaaactttagagaagtgtttgtctcccataattgatttctgtgcaacagccatgggttgagaccaatttaagaaaatcttaagtgtggccgggcgcggtggctcacgcctgtaatcccagcattttgggaggccgaggcggtggatcacgaggtcaggagatcgagagcatcctggctaatacggtaaaaccccgtctctactaaaaatacaaaaaattagccaggcgtggtggtgggcacctgtagtcccagctactcaggaggctgaggcaggagaatggcgtgaacccaggaggcggagcttgcagtgagccgagatcaggccactgcactccagcctgggtgacagagagagactctatctcaaaaaaaaaaaaaaaaaaaaggaaaaaagatcttaagtgcatattatttataggggaattttgaaatggttcctatgaaaccattattatttttcatattaacaggtagtttctgcactttttaagcccccaacagccttttggtagaagccattacccccagcatgtagccagtcatgtaggctgatctgggctccatttcaacatgaataataaaaaacgctgctgcccattaaaaaaaaaaaaaaactgagcagccacatttggagacagcatgttctaggattcaaccccagagggaattttgatgctgatattaaataccccctaaaaaatcaggtttataatgaacacataagaggctccataattaaacactggtttaaattgcacatgtacaacacgcaccaacctcccatctagacatcaacttacccagctgactcttacataagaaaatagtattgataccaagattagaaatttgtgggttttttgtttttattaggtttcataattattttaagctctagtaactaaaaagggggaggaggaagaagatgatgcagattttttttttttttgagacagagtctctctctgtctcccaggctagagtgcagtggtgcaatctcggttcattgcaacctccgcctcccaggttcaagcaattctcctgcctcagcctcccgagtagctaggactacaggcatgcaccaccacacccggttaatatttttgtatctttagtagagacagggtttcaccatgttggtcaggctggtcttgaactcctgacctcaaatgatcctcctgccttggcctcccaacgtgctgagattacaggtgtgagccaccgtccctggccagatgatgcagatttctcaacatctgcaagcttgcaacataaatggccaaaagcaaggaaattccaagtgcatgcttacattccatttttccttgatacttttggcctggtgatttattatagggtttcagatgagtgtgttctattagctgccatatgtacacaaaacaccaggggacaaactgaggaccaaggggacagctgaccgttgaatatctccaatttggggattaagtttgaaatggttggtttgtgaatggtaggaggaatctttagcctatgcactgagcctgtcagcttggatgatgaccatgcccaagagtggagccttactccctggagtccatagaaaccctgaaagctgttaggctttgtgtttcctgtaggctgcaactgttcccttcagggagctgtaagtgtctcaggttttgaaagttgtcatgatgaggttatctaaacctcatggaatcttccaccctctccaaggttgaccttataatacgaatcacttctcacctccaacatagaaccatgttattagccaggtgtattttttctcattaactctatttggggtttttggtttggattttattgttttcatcgcttttagtttttggtgttttcaatatgaagcggtgaactcaatggagatacaaagggtgagaaattccctctagttgaatccactatattcaagtaatgggattgcaagttgcatggtgggaagctaacatttaacatactaagcagatcataaaatgtcttactagaaaaaaagtcctttacttttttctgcctagctttcaaagacttcctaaacctgttttacaacccgaagcatgggactctgatataactgcagttctacatcatagaaacttcaatgagactgagtatccctcattgccctgcgtcaaactatagccccataagaaactaacaattagatgcaatttgcctttttcccttgccatactcatttgtctttatttttgtgtcatgtataagctcaagagaccaatgtgatgattattaatgtagaagaagtaatgatatttgtactggaaaaggcagctactagtacaaaaaataaaaagaaataatgatgataagcaaagtctcttaggtataacatgtccctaaaattcagggttttttttttaaagggatttaaggaaaaatacctgtgaaataggtgtgatttcttaaaacttttgttcccacgtattcctaaaccagcatcctcaatcttacccaaagatgctaattggcagacccacccttccttccttcctgcctgcctgccttccttccttcctttcttccttccttccttccctccctccttccttctttttcttttttttttttttttttgtgaaagttacactcttgttgcccaagctatagtgcaatggcatgatctcggctcaccgcatcctccacctctggggttcaagcgattctcctgcctcagcctcctgagtagctgggattacaggcacccaccaccacacctggctaatttttgtttttttactagagatgaggttttgccatgttgaccaggctggtcttgaactcctgacctcaggtgatctgcctgcctcggcctccctaagtgctgagattacaggcacatcttttcttaacagagaagaacaaagttcaagggatgagatggaaaaaggaggggaagaataccagctcagtacaactgttttgtgactgctctgctaagacatgtcagggcagaatgacagcagttttgaaagggcttgtcagtcagctgggtcatagatggaaagttaaaatgacctcctaaggtcaaagtttatatggctgcataatgcagtaaatgagtcgaattggtacccacaacttctgtcagtagggtcacataaggagtgtgtctgtctcattgactataatttatttcattcaacagcaaagctatatttgcggtggcactgactgtctgaattttgacaacttcattttgggctttaatagaaatgtagtttgctgcaacctagaaggacttagtctcctctgtccctctggtagacaggctgccaagaaatcttcatactttgtcaatattttagcattatctgcatatcatctggccctgagtagaaattattaacacttatgcattgctaatcttcagtgcatcatattgaatacattgggaagggatttgccctgttaaggaaagcagggagttgcaataggtttgttgtttgtcgttaacatggggttggttggatttttgaaagagaaatgctttaaaaaaatctttctcaggagtatcataaaacacaacatgtaatttaaaacccatttggataattgactgatttgacaagaagacaaccttagaattaaactatatattagaatcaaggagtgatatgattgtataccatcagtacataatactttgctattttgataggtatctcataagggactgaagcgaatatgcatatttcccctaatgtttctgtaatttagatttctttgtttagagccatgattggggagtaataaagctttacagaaacttcacgagctgattgacaagcctgttttcaagtaaaactgctgtgtggaatattttatttcatagcaaaacatgtctgtgtatttggttttcttctgactgtcttttgaaatatgttaccaggtttcatcagagcaagaaaaagaacaagagactttaataagccagaaaagcatccctgagcctctcccagcagcagacatgaagaaaaaaatagaagggtatcaggaattttcagcgaagcccctggcatccagagtagacccagagaaggacaacgaaacagaccaaggttccaacagtgagaaggtggcagaggaggcgggagagaaggggcccacacctccactcccaagtgctcctctggccccagaaaaagattcagccttggtccctggggccagcaaacagccactcacctctcctagtgccctggtggactcaaaacaagaatccaaactgtgctgttttacagagagccctgaaagtgaaccccaagaagcatccttccccagcttccccaccacacagccaccgctggcaaaccagaatgagacggaggatgacaaactgcccgccatggcagattacattgccaactgcaccgtgaaggtggaccagctgggcagtgacgacatccacaatgcgctcaagcagaccccaaaggtccttgtggtccagtcgtttgacatgttcaaagacaaagacctgactgggcccatgaacgagaaccatggacttaattacacgcccctgctctactctaggggcaacccaggcatcatgtccccactggccaagaaaaagcttttgtcccaagtgagtggggccagcctctccagcagctacccttatggctccccaccccctttgatcagcaaaaagaaactgattgctagggatgacttgtgttccagtttgtcccagacccaccatggccaaagcactgaccatatggcggtcagccggccatcagtgattcagcacgtccagagtttcagaagcaagccctcggaagagagaaagaccatcaatgacatctttaagcatgagaaactgagtcgatcagatccccaccgctgcagcttctccaagcatcaccttaacccccttgctgactcctacgtcctgaagcaagaaattcaggagggcaaggataaactcttagagaaaagggccctcccccattcccacatgcctagcttcctggctgacttctactcgtcccctcatctccatagcctctacagacacaccgagcaccatcttcataatgaacagacatccaaatacccttccagggacatgtacagggaatcggaaaacagttcttttccttcccacagacaccaagaaaagctccatgtaaattatctcacgtccctgcacctgcaagacaaaaagtcggcggcagcagaagcccctacggatgatcagcctacagatctgagccttcccaagaacccgcacaaacctaccggcaaggtcctgggcctggctcattccaccacagggccccaggagagcaaaggcatctcccagttccaggtcttaggcagccagagtcgagactgtcaccccaaagcctgtcgggtatcacccatgaccatgtcaggccctaaaaaataccctgaatcgctttcaagatcaggaaaacctcaccatgtgagactggagaatttcaggaagatggaaggcatggtccacccaatcctgcaccggaaaatgagcccgcagaacattggggcggcgcggccgatcaagcgcagcctggaggatttggaccttgtgattgcagggaaaaaggcccgggcagtgtctcccttagacccatccaaggaggtctctgggaaggagaaggcctctgagcaggagagtgaaggcagcaaagcagcgcacggtgggcattccgggggcggatcagaaggccacaagcttcccctctcctcccctatcttcccaggtctgtattccgggagcctgtgtaactcgggcctcaactccaggctcccggctgggtattctcattctctgcagtacttgaaaaaccagactgtgctttctccactcatgcagcccctggctttccactcgcttgtgatgcaaagaggaatttttacatcaccgacaaattctcagcagctgtacagacacttggctgcggctacacctgtaggaagttcatatggggaccttttgcataacagcatttaccctttagctgctataaatcctcaagctgcctttccatcttcccagctgtcatccgtgcaccccagtacaaaactgtaggctcagctctgcccagcagtccaaagcggcatggccaacagagcttcactccttacccaggagtgctggcttatagagttagaagtcagtatttcttctaatctgaggctatgatcagtcccagctgtaggggcccagaggggaggtgaacatgcctgatttttgtgggacaactctagcccacaaactgactggctggtgagtcttgactcccttccaacacagatgcccaggcacctccagatcattcacttcgcacgtgggccttgtgaagggatttgtgaatatccaggaagaacttagaggaccccatctgagttcggatggtcaggaaacaatctgggcaaaaaagaggcaggcatttcaaaggaaggggcaaggaagactggcaaacagatggcaagggatgcccctctttttcataaaactctccaaggttcaatcaatgcaatgtatagtgaaacttcaatagatctttcattttgacactattaaacaatccagagaagtaaacactgtt

SEQ ID NO: 983 - DNA, 11343 bp, Homo sapiens
gccggccgcggcccgcgggggcgacgcagcagcccgctgtccccgcgccgccggcgggggagctgatccagccgtcggtgagcgagctgtcccgggccgtgcggaccaacatcctgtgcaccgtgcgcggctgcggcaagatcctgcccaacagccccgcgctcaacatgcacctagtcaagagccaccgcctgcaggtgagcccgacgcggccggcggcccggggggccgggcctggctccaacaaagcgcccggcgccggcgcgcgaagccggcctcggggggacgagcgccctgcgcgctgccgctgccgctgccccaccggcctctgccctccccggccggaggcggctctcgaaccctcgcggcaggcgccgcaggtgcggcctctgggggggaggaggagctgggagccccgggtccgccgtacgcgccagttccctggttccctggctccctggccccgagtgtcgtgccggacgccggcccaggctttttacacttttttgcctgtgagttcttaacggcgttttggcgagggacgcatcgtctccattatattaatgagaaacagattatgcaacctagatgatgcggggctttaaaccggggcctctggttctgaagccctgtgcttgccacgacacccacaatgccgcccttgggtcctgcccagtggactgtatgtgccacaataactagaagagagggttttaaatgttctcaccaccaagagacaatacgtttgaggtcgaggacatgttaaacactctgacttgatcactatgcaatgtatatgtccatccatgctgcacaccgcaccccatcagtaggaataattactgtgtgtcgattatgaataaaaaaatgttttaaaggagcggtaggtttgcctctaaacaccatcagtcagtttcacggtgttggtaagatcagctcaggactgagacctaagggaaattgcccctgtggctcttctttaagagggggacacagtaaatacaccatgacaatagtctcaacaaccctccacgttatgcaaaacagggcagtcattttcaaccttgggacacatctgtgacgagcttattaaaaatccagatgtccagccccaccccggacctgttaagtcacaatctctcagtcattacaatggcaagtttccttccaccactctaggccagcagtgacataattcaaaagcgcaagtcattgaaagcagttctgcgaatatgtagcttttgatgatcaggagtaaatttagagtacccagaatattgcatgttctgtctgcccatagtcaggcttctgataagaatttcacagcagaaaactctgaggttgtagtctctagtaggacagatgtgtcgccaatgaagagtgatctgctcttaccaccatctaaaccgggatgcaacaacgttctcaattgaagatcagggagccagtcaggaaatgtacctgaggtatgctgaggaagaccgtgcaggtggggccgaattgttggactgaaaagctctgggtttctttcagcactcaagtgtaactctgggaatggctttcaacctgttgttttgttttcatactaaattttaactaaatcctttttttccctattgtttttgtgtttttttgtttgtttttgagacagagtctcactccatcacccaggctggagcgcagtggcgccatctcagctcactgtaacctctgcctccggggttcaagcagttctcctgcctcagcctccctagtagctgggattacaggcacctgccaccacaccctgctaatttttttttgtatttttagtaaagacaggttgcaccatgatggccagcttggtctcgaactcctgaccctcaggtgatccacccacctcagcctcttaaagtgctgggattccaggtgtgagccaccgcgaccgacctaaatcctttatttaatcataacttaggtggatgaactatttcttaatagtttctgttgttcctttctgtggagttgttgttaggagctctagctctttaaagaccctggtaaacatctgttgaacataaagataccatttgcctttcaggactggttagtatacagtaggtttgtttctaattatgttgggttttttttgttttgtttgagacagagtctcactctgtcgcccaggctggagtgcagtggcgccatcttggatcactgcaacctctgcctcccaggttcaagcgagtctcctgcctcagcctccctagtagctgggattacaggtgcataccaccacgcccagctaatttttgtatttttagtagaggtggggtttcaccatgttggccaggctggtctcgaactcctgacctcaagtgatccacccgcctcagcctcctaaagggctgggattacaggtgtgagccactgtgcccagccagggcaaacttttttttagcaggaattatacctcaccagatccatcatttttttcttgacaagcagactgactttcctgtcttgtcctggctttctaaccgcagtgccccgtggcccctgagcagctcctgtcttggtgtcttcctttaatgaaggttgtctgtgtgatgcaatagccatctatatgatggtgcccagtatggagatctgtaccctgtctggttactacatagaaggcttttcagggtcttgctctgttaacccaggttgctgtcaggctcttgagctcaagtgatcctcctgctttagcctccccagtagctgagactataggctcctgccaccatgccctgcctcaaacattgttctttttgtttgtttgtttgagacagtctcactctgtcgcccagactggagtgcagtggcatgatctcggctcactgcaacttccgcttctcgggttcaagcagttctcttgcctcagcctcccgagtagttgggactacaggcatgctccaccacgcccgactaatttttgttttattagtagaaacagggtttcgccatgttggtcgggctggtcttgaactcctgacctcaagtgatccgcccgcttcagcctcccaaagtactgggattacaagagtgagccactgcgccaggcctcaaacatcaatgttgatacctgttttcaaagtactggaagaaggtaggggtaaggacaaggaaccgggaggaaggctggctgggaagctatcttaggttttaagagctgtgttgaccagagactccatccactttctgccctgagtatcttattggcaggttttcttatagtcagtggaaattttcggtcttagttacagctgcttgcataatttctttcattgtttatatattttctagattatattttcttcccctccccactagttgctgttggttcttattttattctaatctttcttcccaaaacaccccacccccaaccaaatcttcccttcttaacataaatgatgagcaacgaggatgggtgagaatgaggaattggattgcaaactgtagagtatgtgccgccttctggtttgatgtgggtgcctaaggtatatggccatattccatatcctgtaaggaaatccagaaatctagcccagccttgtgtatggtgggattcatggagaaatgaaagccatgaggattcaggggcaggaagagcagaagtaaatgtacatttttttattcctagagattcttttgttccttgtgtgtgaaagcagtggaggggacaggcaggcacttaaagaacctcttatcaagcaacatttatattgtaaaacatggcttagaggattttgtgttatttttagtccagaggtttgtttttaatgatttgccagaaattttttaaggaaaggaaaggttccaagttactctatagactatactgtacaaagatttctaattttaaatttagaataagatgacaaagcaaaccgtttccttcttggatgctttctcggaaggcagtcaggtggtgctagagtagctagacagacagtttttcctagtttttgctacagttcttacaatcgtttcttttcaccctctactcttcaactgtgtcttacttttcctcttgtatattttctttctgtcttgttactggattgtttcctctcataggttctcttttcagttatgcgcacaaaagatacagtacaaaaagtccagtgcattttattcttgaaagtatatagaacttcagaatgaaaacaccactttctcactgcacttccattttatcgtgccattgccatttctcatctgagccatcctacccttgagcttattctctgaggacagaaatgggaagaaggccccagaagcagtgggtgggggtgggaggaggctgctgtgctggtgagtggtggggtgttggctctcagaaaacaggagcatggacagtgtcagcttgttgccatgacagtgaggttattaacatccacttagactgtcttcagtggtctcttacccaggcatgatagttttggcttagatggctacctgaagagattcagtataatgctaccagtttttattgaacatttattctgttcaaaacattcccaaaggcaacagaagatacaaataaatctctgcccatgaaaaggtgtggggggcattagaaggcgttctcttcggtgtaatgaagtaatgagagaagaaaaagtagtttgaagctatggagtaagggactttgagtatcccaggctcaaaaagttgggacttgaacagtacgggggtgctgctgaaaacgtttgagggaggtaatgacatgatcgaagctatacttgagaaaggtgaatctgataaagtatgagtgaaaaagagactgaaggtctagaaattagattgaggctaatgacaaaatccacataaataggaggacttgaacgaaggggcacttagaagaggacaggagatagtaaaaggcattcaatgatgagagcacacactacaggggagcatgagggaggttggaaaagataatgaaaggattaccgagcttcactgacgatgtgtttgaaatgagcaggaatcttgtagtgatcctaatccgtggttttctggagcatttcacagcctaggaacatacaaggggggcatctccctggaatgtaaattgactaagaggaattcaataatggtcaaatgaatgcagaattttagagtcttgcttagtattctcaccacatttcgtttagtctactcatactctttttctcttactgctgacactagatggaaaaactcttaattaaaagtatttcacaaaatgtgctcgttttcagtcattccgtttccactccagcctgttgtgttgtttttttgaaataataatttaaagtaattttccttttgcaggatggcatagtcaatccaacaataagaaaagatttgaaaactggaccgaaattctactgctgtccaattgaaggctgccccagaggccctgagagaccgttttctcagttttctctcgtaaaacaggtactctctactctgaggatgagatacagatgctaaaaacctattgtgcattctgattacttagcagacataactacagaattgagtagacagctgcttgtgaggggagatgcctgcgtgtctcccagttggtataaacctgagtatgctgttacacaagtggagggaaaagcggcacggtctggagggaatatgtctagaagtgagttaaaatacagagagagagagtaaaccagttcagcaaagaatgagaaaatgtttgctcgcagatctcctgtgtgagtctgcatacctccaagggcccagcgcaaaggcacaaaggaactgttctcccaggggaataagaacctgcagaatccaggaaaagaagagttttggaagccgcaatcttaagaggagggagggccccagtgactgggacaagaggtgattcagaactggaagagattggcatctgaaatgttcccctgagggtctgctggagggcgtcctgagaagagcattgtaaagacatttttttcctgcctgcagcacttacagatcagagtgtaaatgctggagaccatagatgtttccaaaacaatctcctcacttttcacaaagcaaaagcaacaagaagaggcatatatataattaactgcgatgttcctgcttttacattcttttgacttggactgctgtattttatgttatttatattaatagtgtaaaatcattattaatttgggtgtatgatggtttctgaaatgttttgaccagttgctgtttttcaccttagtcccttctgcgttcctcctagcactttatgaaaatgcatgctgagaagaagcacaaatgtagtaagtgcagcaattcgtacggtacagaatgggacctgaaaagacatgcagaggactgtggcaagaccttccggtgcacatgcggctgtccctacgccagtagaacagcactgcagtctcacatctaccgaactgggcacgagatacctgcagaacacaggtgaagggaaagaaatgatggcacagaagtcagtagctatgggaagcatttcagatgaaacatcctggagagccagtggtgtggggaggaaaaaggaatcttagaaaatgtgtgacgtggaagaaggaagcttttgaaaatggaagcaggtcttgcaaatgacacatgtctgggcctgaaatcttgacccaattgttccccctatttttttctgccagccctctttgagagtcccttgttatttccatttgaaaatctcagcttccagaattttctatcagagggaaccaaactgccaacaaataagttttatcatgaaactgtacttcatttaaaggtcaaattttcatttagtgtgatagcttcctgccttagaaatgataaaacttgcattatgtaagtcttttagcttcttttggcttaaagatctgagttgagttctagtacttagagcttaacaaaaggtatgtttcctccttctctgtttgcatgtttctcaaagttcacctgctataataggaccaactcccagagttgcgaaagaatggatttatcttgtctgggttgaacatgacctctgctatagatgggggaaatggcatttgtaagtgaggatagagtgtcatggtcgaagaaagttgtattttaaggttttctttttgctctgtcattgttttcagggacccacctagtaagaaaaggaaaatggaaaactgtgcacaaaaccagaagttatccaacaagaccattgaatcattgaacaaccaaccaatccctagaccagacactcaagaactagaagcttcagaaataaagctagaaccatcttttgaagactcttgtggctctaacactgacaagcagactcttacaacaccaccgagatatcctcagaagttgcttttaccaaagcccaaagtggctttggttaaactacccgtgatgcagttttctgtcatgcctgtctttgtgcctacagccgactcctcagcccagcctgtggtgttaggtgttgatcagggctctgccacaggggctgtgcacttaatgcccttgtcagtaggaaccctgatcctcggcctagattcagaggcttgctctcttaaggagagcctacctcttttcaaaattgctaatcctattgctggtgagccaataagtactggtgttcaagtgaactttggtaaaagtccatctaatcctttacaagaactagggaacacgtgtcaaaagaatagcatttcttcaatcaacgtgcagacagatctgtcttatgcctcacaaaactttataccttctgcacagtgggccactgctgattcctctgtgtcgtcttgttctcaaactgatttgtcgtttgattctcaagtgtctcttcccattagtgttcacactcagacatttttgcccagctctaaggtaacttcatctatagctgctcagactgatgcatttatggacacctgtttccagtcaggtggggtctccagagaaactcaaaccagtgggatagaaagtccaacggatgaccatgtacagatggaccaagctggaatgtgcggagacatttttgagagtgttcattcatcatataatgttgctacaggtaacattataagcaacagtttagtagcagagacagtaactcatagtttgttacctcagaatgagcctaagactttaaatcaagatattgagaaatctgcaccaattataaatttcagtgcacagaatagtatgcttccttcacagaacatgacagataatcagacccaaaccatagatttattaagtgatttggaaaacatcttgtcaagtaatctgcctgcccagacattggatcatcgtagtcttttgtctgacacaaatcctggacctgacacccagctcccatctggcccagcccagaaccccggaatcgattttgatatcgaagagttcttttcggcctcaaatatccagactcaaactgaagagagtgaacttagcaccatgaccaccgagccagtcttggagtcactggacatagagactcaaacggacttcttactcgcagatacctctgctcagtcctatgggtgtaggggaaattctaacttcttaggccttgagatgtttgacacacagacacagacagacttaaactttttcttagacagtagccctcatctgcctctgggaagtattctgaaacactccagcttttccgtgagtactgattcatctgacacagagacccaaactgaaggagtctccactgctaaaaatatacctgctctagaaagcaaagttcagttgaacagtacagaaacacagaccatgagttctgggtttgaaaccctggggagcttgttcttcaccagcaacgaaactcagacagcaatggatgactttcttctggctgatctggcctggaacacgatggagtctcagttcagctctgtagaaacccagacttctgcggaaccacacacagtctccaacttctaaaactaacggtggagtccatgtgtgaaatggcatctaccatttcctctggattaaaactacggactggggacaacagtattaattcgattgaatgtggctgatgatgcagttgcttagcttctttgtgtttctttgccttttgtacttgtaaacagaaatttgcgtataaatgtgagtgtattataaagtttgagatgttgatctaaattgtttttgtgttgcctacatttgccttttcacagctagtcttttcatgttaaaaaaaaaatgtatttcatatctataaaacctatatagccatttagctgaagcccagcttaccaggttcaagggtacaaacttctcaaatcttcaaaacattttagtcaaagtgtaatatacttaaactgcacctaaaatatctttggcactgcttgttagaaattcctgattcctgttactaatcactaaagaaaccggatgctgccaccgtaggatttaagcagtagtgcttccatgctcttaagactcctgctgcctggaccttcgtcagctttgacacctcttttctgatttaaagacaccaaggaaaactacaactgtctttagctttgaagcagttttcatgtaatcattgccacctcttcgctacatgaactactattgataccagcatacaagtgtatagcactttacacacaagaggtttattgatgtaaaattatcggctagggaagcagcagcgggccaggtgtggtggcttacccctgtaatcccagcactttgggaggccaaagcaggacgatcacttgagcccaggagttcaacaccagcttgggcaacataagaagaccgtgtctctggaatttttttttttttttaattagccaggcacagtggcatgcgcctgtgatcccagctacttggaaggctgaggtgagaggatcactcgaggagattggggctgccatgagccatggtcttggcactgtactccaacctgggtaacagggcaagaccctatctcaaaaaaaaaaaaaagtcgccagcaacaagcacgtagtgtagtgttcctgctaaatgagcataggttatccaaaccttgggaacagggagttatggaaacgtgcctatgacttcatcttggggtgtgtcctatgaagatcctttctggtctccacagtaggccagagttgggggctctggagctgtttccccaagtgcatccacaagctggatctgagttttgtcactctaaaattaaacaagaaaaaaagtgggaaaagggcatcccccattaggtttcaatactttgcacttctactaagcttgatagggcaggagtgcaatctacaattattttaaagtgaatttccttccattcaccattctttatcttttctttgaataagaaaaagtatctagcaaggatattacttgtgccttgaggctagcaattataggatagattcatctaaaatatggtattctgcattttggttttttttcttaagtgaataataccagtcttcaaagaaaacaaggtgaagacctattgcttcaataatcaagaatgctttgtgtgttttgaggtaggagcatgatcaagtatgctttggggattttctgtatttaggagatcctggattcttaattgttggctaagttccagtcaagtaggaatcagtgcagcctgtaagttctccacattgacacacacacacacacacacacacacacacacgacatgctcctttctgtggcacatgcctgtattactgaaagctaaatcctcaaaacctagtaaggggaccaatgattcattaaagtaaattgatggttttgctactaattcctatcccatacatttgacacaaaagaagtgttggtaatggataaataacatatcccgggcagatgagctcaacctagtaggtaagagtttggtttggtcacagttgcctatgagtgtgggtttcaaaagaaacataaagccttaacttagaatttcattatgttttagaatcatcactgccttaatattcaagcatctatttaagtcctaataaaggagaaatgcatgtttatggcttttttgtaaatataaatgcagtgatctatggcttaaaaaatttgtttctgtgacaatgtttgtaaatctagccaatagagtcatttacagaagaaaaatgagcatgtaataatacaagaactgtttccccctcaaaacctgaacctgaattatttgtaaaaactgaaatttaatgattaaagagaagccagaattgtacccttttttgtgaattcttgaacgtactcataaatatgacttattgtattgccttaagttttcactcattgtcttttgaaagccatatgataaaatgattttatttaataata

SEQ ID NO: 984 - DNA, 970 bp, Homo sapiens
ttactgattctggagatggaggaagggtccgcaagccaaggaatgtaggcaacctctagaagctgggaaaggcaagtgaacagattctcccctggagccttgggaaggaatacagccctgctgacaccttgatcttagcccagcagtctcatttcttttgacctccagagctggaagataataaatgtgtgttaaggcagtaagtttgtggtaatttattaatagcaagagaaaacgaatatagctgctagtatgtaaaaggtggaaattttcacataaaactctagccataccaaagatgagtagcagctgcccccttttaataaaggatgtgtttccaatttcactgcagtcctcacccctcccttttgtctaccccagcctcctatgtccatttacatgaactacccagtctaagtattaagttttgtaatcgtatactgaactgcagtgtctcccaaacagtaatcctaatttcagcagctaaaatagaagcaagcaaatccagccttcttaaaatgattaaccctatcaataataacaatcttttcatttgtatagtgtggtctaggtcaagttacttaatttatataagcctaaatgtccttctctgcacaaggtggggcaagttacagtacatacccgctacagtcgttttgaagacaaaatgagacacagcatgaaaagtgcatccaccagacccacctggtacccagtaaggcctaggtaataaacaacggcggaaatcagtgtacttctgcctcacctgccactagacatttgggttgtttctaatctttgggaagtaaacgcattgctcaacgtattgctttttcttttatgtgactactgcctgaagtcactttcctaggaagaatggatcgattagagaggcggggcaataccttttacctgctggcaggtgaaatttcgcctcctggcggcgtcacctaaagtcctctccctccaa

SEQ ID NO: 985 - DNA, 4226 bp, Homo sapiens
tacctcattaatggatctgtcctttttcttttctaaccacttccttatgttacttctgaaatctagtgaggctctgtggtgtctgactttccctggctgcttctttagttttgtctccttttccaggctcaacagcgtgctgatggaagtggaagagcctgaagtcttgcaggactcactggatagatgttattcgactccatcaatgtactttgaactacctgactcattccagcactacagaagtgtgttttactcatttgaggaacagcacatcacctttgcccttgacatggacaatagcttttttactttgacggtgacaagtctccacctggtcttccagatgggagtcatattcccacaataagcagcccttactaagccgagaggtgtcattcctgcaggcaggacctataggcacctgaagatttgaatgaaactatagttccatttggaagcccagacataggatgggtcagtgggcatggctctattcctattctcagagcatgccagtggcaacctgtgctcagtctgaagacaatggacccacgttaggtgtgacacattcacataactgtgcagcacatgccgggagtgatcagccggacattttaatttgaaccatgtatctctgggtagctacaaaattcctcagggatttcattttgcaggcatgtctctgagcttctatacctactcaaggtcagtgtcatctttgtgtttagttcatccaaaggtgttaccctggtttcaatgaacctaacctcattatttgtgtcttcagtgttggcttgttttagctgatccatctgtaacacaggagggatccttggctgaggattgtatttcagaaccaccaactgctcttgacaattgttaacccgctaggctcctttggttagagaagccacagtccttcagcctccaattggtgtcagtacttaggaagaccacagctagatggacaaacagcattgggaggccttagccctgctcctctcaattccatcctgtagagaacaggagtcaggagccgctggcaggagacagcatgtcacccaggactctgccggtgcagaatatgagcaatgccatgttcttgcagaaaacgcttagcctgagtttcataggaggtaatcaccagacaactgcagaatgtagaacactgagcaggacaactgacctgtctccttcacatagtccatatcaccacaaatcacacaacaaaaaggagaagagatattttgggttgaaaaaaagtaaaaagataatgtagctgcatttctttagttattttgaaccccaaatatttcctcatctttttgttgttgtcattgatggtggtgacatggacttgtttatagaggacaggtcagctctctggctcaatgatctacattctgaagttgtctgaaaatgtcttcatgattaaattcagcctaaactttttgctgggaacactgcagagacaatgctgtgagtttccaacctcagcccatctgcgggcagagaaggtctagtttgtccatcaccattatgatatcaggactggttacttggttaaggaggggtctaggagatctgtcccttttagagacaccttacttataatgaagtacttgggaaagcggttttcaagagtataaatatcctgtattctaatgatcatcctctaaacattttatcatttattaatcatccctgcctgtgtctattattatatacatatctctacgctgcaaattttgggtctcaatttttactgtgcctttgtttttactagtgtctgctgttgcaaaaagaagaaaacattctctgcctgagttttaatttttgtccaaagttaattttaatctatactttttaaaaccttttgcctatcactctggacttttggattgttttttacattcagtgttataatatttgattatgctgattggttttggtgggtactgatgtgaattaataaaaacatttcatttccatgtttattttctaatctcttccacattgtaggctatgtttaccatacgtagcagaatgtatttacatttcttggttctagtcatttgtattcttcgtgagtgtgtgtgtgtgtgtgtctgtgtgtgtgtctgtgtgtgcctttggcatttaggaagggttgtatagctcatgttaaatattgcactaaaaatgtttttgatggttttcctccctttgaactagacacacttctaatatttggtttatagttttaaattataactttcagcatcaaatatttccatacaacagtcaattacatgatgtgttttctttttcctacctcctttacctgccacttctcataatagtatttgaacctaaacatataccggtgacattctgtgattatcatcctgcccctaccttggtttttatccattgtggtttagatccataatgaaatatattaacgctcatgagctattcaaaagtgaatgtcacagtcatcacttgctgagtggtactcatccttaacagagtcctcatgagggaatcaggtctcgctgagtttagcatgtttaataatcttttctcacggtctcgatacatggatcacattactagatataaggtgcttgtccaaaatgatttttctggagcttttaggagatattgtcatccttgggggacatacatggtgtatgttctcattgtgggattctattttgttctaccaggacctctaatttctgccagttacttcattcatttgttctcttcaccatgagtctccagaggatacttgcatggtccgtgcctgcccatctgccagcaattctgcatttccaagattggcacctctggtcctctgcacggtgaagccccttcctttcaattccccagtagccagtgctctaatccaccaggtctcaggcatgatctatgtttctccacactcgctttctgaggagagttttgcctgggttctatcatgaacaggccctccctgctgtcctggcctctatttgcatagtgtttcctgctccctctgccgtcgtgtggctcccagacctggctaaagaaaatcacctgagggccacagtgttccctagccctggtgtttagggcaggattatgggtgagatttttgagtctctaagttgacccctacggctctgaagtgtaagttgagaaattcagctgttatcatcctaggtggacttgctccctcctatcctcctacttcaaatgcagaacttcaatcgtttacaaaagaagactgaatcgtataatagaacacacccttattcattggctggcttcaccaatcatctcatggctgaacttgtaaaaatacaatcttagccacatacctatgaaatgtatgtgtgtgtatatatatgcatgaatttgcttctgagattatggaggctgaaattcccaagatggaaggaaagctggatatccaggaaagcatttgtttcccattaggcctcttaattctctcctggcccttgattgattgcatgaggcccacccctattaaggagggcaatctgcttcacttagtctgcccatcccaatgttaatcgtatctgaaagactctctggaacacaaccagaatcatgtttggccaaatgtcctggcaccctggtgctcggtcacagtgacaactacaagtaactatcacacatgccctttgtcatattggtgatttccactgtttttctcccaaactgcagcttatatttgttctcttaatactgttgagcaaaaacttttaatttttataaagtcgaatttatcaatgttttctttaatggtttgtgtttattgataataaagaacactttgcctaactctgtgtcatgaagattttgtcttatattttctgctatactttttctagttttatagtttatatttagttgcataatccattttgagttagtttttgagttagtattgaggttcaggtgaatttttttcctttgggtataaaaaaaacaaattgtgtaaaaaaagttgtttctacacaatttgttgacaagagaatgccttctccactgaatcatatttgcacctttgtcaatccattgggtggttgagactggtgagaggactgtcctggtgtttggacagagagacagggcatgaagtagggtggttcttatgggaaaaattaaggaagacacatttttgcatgaggaataggaaatccccaagcacaattgggggtaccctctac

SEQ ID NO: 986 - DNA, 6753 bp, Homo sapiens
agttttcctcctaagaaatcttgtgggcattttttttgaactgatgggaacaataaggcataactgtttgcacaaacttgggataaatgattttgggataacgatctaccagaatagggatatttcacccttggttctgagatgcaaaccaaagaatatcatgaccagctttcaggcctcctgaagtatatccctcaaattgtcctgttctcatgctgaggagcctgagatccctgtgtggggattagacagtggactgttatgggtgtaggtgaattggcttattttgtctgtccctgcctgaatgtattgcaggaattaaaaaggaccaagaagaggaagaagaccaaggcccaccatgccccaggtaactgagcaattgtgaacagctacttctgtgttgacatctggagactcctggttcagggaaaatagagcgggccgacattatcgattacatcttttcaaccaagcctgaattattcctactaacattgctgttggttttcattgcagtagatatttaggtttccatttcttcctccccttatcatttactaacctactgcaggtggaccagacttcaaaaactgtattctcatggtgactgcatggaaacttgagcacattttatggaaaattattgagcacagtcttcatgatcactgtatgctgtgtgtcctgagggcactaactcagagtgtcctgttactccctcatcagtgtgtcacctggacaattcactgagctcgttttctctctctctctctctctttctctctcagtgtgtgcgtgtgtctttgtgtgtgtgtttgtgtgtgtgtgtgtgtgtgtgtgtgtctgtctttctctttcattcttttccatttggccctgttctgtcccaacatgaaggcaataatttgttacctcattaatggatctatccttttacttttttaaccacttccttatgctacccatgaaacctagttggggctctgttgtgtctgatttcccctggcttattctttactttttcctccttttccaggctcagcagggagctgctggaggtagtagagcctgaagtcttgcaggactcactggatagatgttattcaactccttccagttgtcttgaacagcctgactcctgccagccctacagaagttccttttatgcattggaggaaaaacatgttggcttttctcttgacgtgggaggtgagtacgtttctatgaaggtgataaggatccactgagtcttccatataaagatcatattcctgctccaagtggccattactgagctgagagatgtcattgccgcagtgaggacctataggcacatgtaggttgaatgaaactctagttctacctggaagcccagacatgggatgggtcagtgagcatggctctcttcctagtctcaggccatgcctgtggcactctgattctactctcatgacattggacctgggcagatgtgacaaattcagagaactatgattttgactcaagggtttgtagatttcctttttcactctaatttcagtgtctggagtcctcacaaccatgaacaatctgagtatttgatgagacagggctaaatattgcagtttttctcctagaaatcatttgagggtatttgctttaaattgattggaaaaataaggcataactgtttgcacaaacttgggacaaatgatattgggataacgatctactagaatagggacattttacccagagtttctgggagaaaaaccgaggaatttctatcacgaccagccttcaggcctcctgaaatatatctctcacagtgtcctattcttatgctgaggagcctgaggtccctgtgtgaggattagacagtggattgttatgtgtgtaggggaatcagcttaatgtgtctgtccatgtctgaatttattgcagaaattgaaaagaaggggaaggggaagaaaagaaggggaagaagatcaaagaagaaaagaagaaggggaagaaaagaaggggaagaagatcaaaacccaccatgccccaggtaactttcagcaattgtggatgcttaattctgtgttaacacctggaggcaacagattcagggaaaccagagtgtgtttgatgtcatgttttcaacgaaggctgaattactcctactgtcattgctgttggttttcattgcagtagatgtttaggtttccatttcttcctccccttatcatttagtaacgtaccataggttgaccatacttcaaaagctgtactctcatggccactgcatcgaattttgagcatattttatggaaaactattgagctcactcttttcatgatcacagtttgctgtgtgtcatgagggcactaactcagagtgtcctttgactcccttaccagtatgtcacctggccaattcactagctcactttctctctgtctctgtctctgtctctgtctctgtctctgtctctctctctctgtctttctctttcattgttttctacctggccctgttctatcccaacataaaggcaataatttgttacctcattaatggatctgtcctttttcttttgtaaccacttccttatgttacttctgaaatctagtgaggctctgtggtgtctgactttccctggctgcttctttagttttgtctccttttccaggctcaacagcgtgctgatggaagtggaagagcctgaagtcttgcaggactcactggatagatgttattcgactccatcaatgtactttgaactacctgactcattccagcactacagaagtgtgttttactcatttgaggaacagcacatcacctttgcccttgacatggacaatagcttttttactttgacggtgacaagtctccacctggtcttccagatgggagtcatattcccacaataagcagcccttactaagccgagaggtgtcattcctgcaggcaggacctataggcacctgaagatttgaatgaaactatagttccatttggaagcccagacataggatgggtcagtgggcatggctctattcctattctcagagcatgccagtggcaacctgtgctcagtctgaagacaatggacccacgttaggtgtgacacgttcacataactgtgcagcacatgccgggagtgatcagccggacattttaatttgaaccatgtatctctgggtagctacaaaattcctcagggatttcattttgcaggcatgtctctgagcttctatacctactcaaggtcagtgtcatctttgtgtttagttcatccaaaggtgttaccctggtttcaatgaacctaacctcattatttgtgtcttcagtgttggcttgttttagctgatccatctgtaacacaggagggatccttggctgaggattgtatttcagaaccaccaactgctcttgacaattgttaacccgctaggctcctttggttagagaagccacagtccttcagcctccaattggtgtcagtacttaggaagaccacagctagatggacaaacagcattgggaggccttagccctgctcctctcaattccatcctgtagagaacaggagtcaggagccgctggcaggagacagcatgtcacccaggactctgccggtgcagaatatgagcaatgccatgttcttgcagaaaacgcttagcctgagtttcataggaggtaatcaccagacaactgcagaatgtagaacactgagcaggacaactgacctgtctccttcacatagtccatatcaccacaaatcacacaacaaaaaggagaagagatattttgggttgaaaaaaagtaaaaagataattagctgcatttctttagttattttgaaccccaaatatttcctcatctttttgttgttgtcattgatggtggtgacatggacttgtttatagaggacaggtcagctctctggctcaatgatctacattctgaagttgtctgaaaatgtcttcatgattaaattcagcctaaactttttgctgggaacactgcagagacaatgctgtgagtttccaacctcagcccatctgcgggcagagaaggtctagtttgtccatcaccattatgatatcaggactggttacttggttaaggaggggtctaggagatctgtcccttttagagacaccttacttataatgaagtacttgggaaagcggttttcaagagtataaatatcctgtattctaatgatcatcctctaaacattttatcatttattaatcctccctgcctgtgtctattattatatacatatctctacgctgcaaattttgggtctcaatttttactgtgcctttgtttttactagtgtctgctgttgcaaaaagaagaaaacattctctgcctgagttttaatttttgtccaaagttaattttaatctatacaattaaaaccttttgcctatcactctggacttttggattgttttttacattcagtgttataatatttgattatgctgattggttttggtgggtactgatgtgaattaataaaaacatttcatttccatgtttattttctaatctcttccacattgtaggctatgtttaccatacgtagcagaatgtatttacatttcttggttctagtcatttgtattcttcgtgagtgtgtgtgtgtgtgtgtctgtgtgtgtgtctgtgtgtgcctttggcatttaggaagggttgtatagctcatgttaaatattgcactaaaaatgtttttgatggttttcctccctttgaactagacacacttctaatatttggtttatagttttaaattataactttcagcatcaaatatttccatacaacagtcaattacatgatgtgttttctttttcctacctcctttacctgccacttctcataatagtatttgaacctaaacatataccggtgacattctgtgattatcatcctgcccctaccttggtttttatccattgtggtttagatccataatgaaatatattaacgctcatgagctattcaaaagtgaatgtcacagtcatcacttgctgagtggtactcatccttaacagagtcctcatgagggaatcaggtctcgctgagtttagcatgtttaataatcttttctcacggtctcgatacatggatcacattactagatataaggtgcttgtccaaaatgatttttctggagcttttaggagatattgtcatccttgggggacatacatggtgtatgttctcattgtgggattctattttgttctaccaggacctctaatttctgccagttacttcattcatttgttctcttcaccatgagtctccagaggatacttccatggtccgtgcctccccatctcccagcaattctgcatttccaagattggcacctctggtcctctgcacggtgaagccccttcctttcaattccccagtagccagtgctctaatccaccaggtctcaggcatgatctatgtttctccacactcgctttctgaggagagttttgcctgggttctatcatgaacaggccctccctgctgtcctggcctctatttgcatagtgtttcctgctccctctgccgtcgtgtggctcccagacctggctaaagaaaatcacctgagggccacagtgttccctagccctggtgtttagggcaggattatgggtgagatttttgagtctctaagttgacccctacggctctgaagtgtaagttgagaaattcagctgttatcatcctaggtggacttgctccctcctatcctcctacttcaaatgcagaacttcaatcgtttacaaaagaagactgaatcgtataatagaacacacccttattcattggctggcttcaccaatcatctcatggctgaacttgtaaaaatacaatcttagccacgtacctatgaaatgtatgtgtgtgtatatatatatacatgaatttgcttctgagattatggaggctgaaattcccaagatggaaggaaagctggatatccaggaaagcatttgtttcccattaggcctcttaattctctcctggcccttgattgattgcatgaggcccacccctattaaggagggcaatctgcttcacttagtctgcccatcccaatgttaatcgtatctgaaagactctctggaacacaaccagaatcatgtttggccaaatgtcctggcaccctggtgctcggtcacagtgacaactacaagtaactatcacacatgccctttgtcatattggtgatttccactgtttttctcccaaactgcagcttatatttgttctcttaatactgttgagcaaaaacttttaatttttataaagtcgaatttatcaatgttttctttaatggtttgtgtttattgataataaagaacactttgcctaactctgtgtcatgaagattttgtcttatattttctgctatactttttctagttttatagtttatatttagttgcataatccattttgagttagtttttgagttagtattgaggttcaggtgaatttttttcctttgggtataaaaaaaacaaattgtgtaaaaaaagttgtttctacacaatttgttgacaagagaatgccttctccactgaatcatatttgcacctttgtcaatccattgggtggttgagactggtgagaggactgtcctggtgtttggacagagagacagggcatgaagtagggtggttcttatgggaaaaattaaggaagacacatttttgcatgaggaataggaaatccccaagcacaattgggggtaccctctac

SEQ ID NO: 987 - DNA, 3391 bp, Homo sapiens
gcagggagctgctggatgagaaagagcctgaagtcttgcaggactcactgggtagatggtattcgactccttcaggttatcttgaactgcctgacttaggccagccctacagcagtgctgtttactcattggaggaacagtaccttggcttggctcttgacttggacagtgagtaccttactatgaaggtgataagcctccacctggtcttccagataggggtgatattcctgttccaagtggcccttactgacctgagagatgtcattgccacaggcaggacctatgggcgcatataggttgtaatgaaactgtagtctcagttggaagcctagacatgaaatgggtcagtgagcaaggctctattcctagtctccagccatgcctgtggcaacctgagcccgctctcagcacattggacccaggcagatgtaaaaaattcacagaagtatgatttggactcaagggtttgtagatttcctccttcattctaatttcagtgtctaaaattcttgcatccatgaacgagctgggcatttgatgagacagggctgaatactgcagttttcctcctagaaatcatctggggcattttctttgaactgatgggaacaataaggcataactgtttgcacaaacttgggataaatgattttgggataacgatctaccagaatggggatatttcacccttggttctgagatgcaaaccaaagaatatcatgaccagctttcaggcctcctgaagtatatctgtcacattgtcctgttctcatgctgaggagcctgagatccctgtgtggggattagacagtggactgttatgggtgtaggtgaattggcttattttgtctgtccctgtctgaatgtattgcaggaattaaaaaggaccaagaagaggaagaagaccaaggcccaccatgccccaggtaactgagcaattgtgaacatctacttctgtgttgacatctggagactcctggttcagggaaaacagagcgggctgacattatcgattacatcttttcaagcaagcctgaattattcctactaacattgctgttggttttcattgcagtagatatttaggtttccatttcttcctccccttatcatttactaacctactgtaggtggaccagacttcaaaaactgtattctcatggcgactgcatggaaacttgagcacattttatggaaaattattgagcacagtcttttcatgatccctgtatgctgtgtgtcctgagggcactaactcagagtgtcctgttactccctcatcagtgtgtcacctggacaattcactgagctcgttctctctctctctctctctctgtgtgtgtgtgtgtgtgtgtgtgtgtgtgtgtgtgtgtgtctatctgtctttctctttcattcttttccatttggccctgttctgtcccaacatgaaggcaataatttgttacctcattaatggatctatccttttagttttttaaccacttccctatgctacccatgaaacctagttggggctctgttgtgtctgatttcccctggcttattctttactttttcctccttttccaggctcagcagggagctgctggaggtagtagagcctgaagtcttgcaggactcactggatagatgttattcaactccttccagttgtcttgaacagcctgactcctgccagccctatggaagttccttttatgcattggaggaaaaacatgttggcttttctcttgacgtgggaggtgagtacctttctatgaaggtgataaggatccactgagtcttccatataaagatcatattcctgctccaagtggccattactgagctgagagatgtcattgccacagggaggacctataggcacatgtaggttgaatgaaactctagttctacctggaagcccagacaagggatgggtcagtgagcaagactctcttcctagtctcaggccatacctgtggcgccctgatcctattctcatgacattggacctgggcagatgtgacaaattcagagaactatgattttgactcaagggtttgtagatttcctttttcactctaatttcagtgtctaaagtcctcacaaccatgaacaatctgagtatttgatgagacagggctaaatattgcagtttttctcctagaaatcatttgagggtatttgctttaagttgattggaaaaatatggcgtaactgtttgcacaaacttgggacaaatgatattgggataacgatctactagaatagggacattttacccacagtttctgggagaaaaaccgaggaatttctatcatgaccagccttcaggcctcctgaaatatatctctcacagtgtcctattcttatgctgaggagcctgaggtccctgtgtgaggattagacagtggattgttatgtgtgtaggggaatcagcttaatgtgtctgtccatgtctgaatttattgcagaaattgaaaagaaggggaaggggaagaaaagaaggggaagaagatcaaagaaggaaagaagaaggggaagaaaagaaggggaagaagatcaaaacccaccatgccccaggtgactttcagcaattgtggatgcttaattctgtgttaacacctggaggcaacagattcagggaaaccagattgtgtttgatgtcatgttttcaacgaaggctgaattactcctactgtcattgctgttggttttcattgcagtagatgtttaggtttccatttcttcctccccttatcatttcctaacgtaccataggttgaccatacttcaaaagctgtactctcatggccactgcatcgaattttgagcatattttatggaaaactattgagctcactcttttcatgatcacagtttgctgtgtgtcatgagggcactaactcagagtgtcctttgactcccttaccagtatgtcacctggccaattcactagctcactttctctctgtctctgtctctgtctttctctctctgtctttctctttcattgttttctacctggccctgttctatcccaacataaaggcaataattttttttttttacctcattaatggatctatcctttttcttttctaaccagttccttatgttacttctgaaatctagtggggctctgtggtgtctgattttccctggctgcttctttagttttgtctccttttccaggctcaacggcgtgctgatggaagtggaagagcctgaagtcttgcaggactcactggatggatgttattctactccgtcaatgtactttgaactacctgactcattccagcactacagaagtgtgttttactcatttgaggaacagcacatcagcttcgccctttacgtggacaataggttttttactttgacggtgacaagtctccac

SEQ ID NO: 988 - DNA, 5860 bp, Homo sapiens
tccatttggccctgttctgtcccaacatgaaggcaataatttgttacctcattaatggatctatccttttacttttttaaccacttccttatgctacccatgaaacctagttggggctctgttgtgtctgatttcccctggcgtattctttactttttcctccttttccaggctcagcagggagctgctggaggtagtagagcctgaagtcttgcaggactcactggatagatgttattcaactccttccagttgtcttgaacagcctgactcctgccagccgtatggaagttccttttatgcattggaggaaaaacatgttggcttttctcttgacgtgggaggtgagtacctttctatgaaggtgataaggatccactgagtcttccatataaagatcatgttcctgctccaagtggccattactgagctgagagatgtcattgccacagggaggacctataggcacatgtaggttgaatgaaactctagttctacctggaagcccagacaagggatgggtcagtgagcaagactctcttcctagtctcaggccatacctgtggcgccctgatcctactctcatgacattggacctgggcagatgtgacaaattcagagaactatgattttgactcaagggtttgtagatttcctttttcactctaatttcagtgtctaaagtcctcacaaccatgaacaatctgagtatttgatgagacagggctaaatattgcagtttttctcctagaaatcatttgagggtatttgctttaagttgattgtaaaaatatggcataactgtttgcacaaacttgggacaaatgatattgggataacgatctactagaatagggacattttacccacagtttctgggagaaaaaccgaggaatttctatcacgaccagccttcaggcctcctgaaatatatctctcacagtgtcctattcttatgctgaggagcctgaggtccctgtgtgaggattagacagtggattgttatgtgtgtaggggaatcagcttaatgtgtctgtccatgtctgaatttattgcagaaattgaaaagaaggggaaggggaagataagaaggggaagaagatcaaagaagaaaagaagaaggggaagaaaagaaggggaagaagatcaaaacccaccatgccccaggtgactttcagcaattgtggatgcttagttctgtgttaacacctggaggcaacagattcagggaaaccagagtgtgtttgatgtcatgttttcaacgaaggctgaattactcctactgtcattgctgttggttttcattgcagtagatgtttaggtttccatttcttcctccccttatcatttactaacgtaccacaggttgaccatacttcaaaagctgtactctcatggccactgcatcgaattttgagcatattttatggaaaactattgagctcactcttttcatgatcacagtttgctgtgtgtcatgagggcactaactcagagtgtccttttactcccttaccagtatgtcacctggccaattcactaggtcactttctctctgtctctgtctctgtctctctctctctgtctttctctttcattgttttctacctggccctgttctatcccaacataaaggcaataatttgttacctcattaatggatctgtcctttttcttttctaaccacttccttatgttacttctgaaatctagtggggctctgtggtgtctgattttccctggctgcttctttagttttgtctccttttccaggctcaacagcgtgctgatggaagtggaagagcctgaagtcttacaggactcactggatagatgttattcgactccatcaatgtactgtgaactacgtgactcattccagcactacagaagtgtgttttagtcatttgaggaacagcacatcagctttgcccttgacatggacaataggttctttactttgacggtgacaagtctctatctggtcttccagatgggagtcatattcccacaataagcagcccttactaagccgagaggtgtcattcctgcaggcaggacctataggcgcctgaagatttgaatgaaactatagttccatttggaagcccagacataggatgggtcagtgggcatggctctattcctattctcagagcatgccagtggcaacctgtgctcagtctgaagacaatggacccacgttaggtgtgacacgttcacataactgtgcagcacatgccgggagtgatcagtcggacattttaatttgaaccacgtatctctgggtagctacaaaattcctcagggatttcattttgcaggcatgtctctgagcttctatacctgctcaaggtcattgtcatctttgtgtttagctcatccaaaggtgttaccctggtttcaatgaacctaacctcattctttgtgtcttcagtgttggcttgttttagctgatccatctgtaacacaggagggatccttggctgaggattgtatttcagaaccaccaactgctcttgacaattgttaacccgctaggctcctttggttagagaagccacagtccttcagcctccaattggtgtcagtacttaggaagaccacagctagatggacaaacagcattgggaggccttagccctgctcctctcaattccatcctgtagagaacaggagtcaggagccgctggcaggagacagcatgtcacccaggactctgccggtgcagaatatgagcaatgccatgttcttgcagaaaacgcttaacctgagtttcataggaggtaatcaccagacaactgcagaatgtagaacactgagcaggacaactgacctgtctccttcacatagtccatatcaccacaaatcacacaacaaaaaggagaagagatattttcggttgaaaaaaagtaaaaagataatgtagctgcatttctttagttattttgaaccccaaatatttcctcatctttttgttgttgtcatggatggtggtgacatggacttgtttatagaggacaggtcagctgtctggctcaatgatctacattctgaagttgtctgaaaatgtcttcatgattaaattcagcctaaacgttttgccgggaacactgcagagacaatgctgtgagtttccaacctcagcccatctgcgggcagagaaggtctagtttgtccatcaccattatgatatcaggactggttacttggttaaggaggggtctaggagatctgtcccttttagagacaccttacttataatgaagtacttgggaaagcagttttcaagagtataaatatcctgtattctaatgatcatcctctaaacattttatcatttattaatcctccctgcctgtgtctattattatattcatatctctacactgcaaattttgggtctcaatttttactgtgcctttgtttttactagtgtctgctgttgcaaaaagaagaaaacattctctgcctgagttttaatttttgtccaaagttaattttaatctatacaattaaaaccttttgcctatcactctggacttttggattgtttttcacattcagtgttataatatttgattatgctgattggttttggtgggtactgatgcgaattaataaaaacatttcatttccatgtttattttgtaatctcttccacattgtaggctatgtttaccatacgtagcagaatgtgtttacatttcttggttctagtcatttgtattcttcgtgagtgtgagagtgtgtgtgtgtgtgtgtgtgtctgtgtgtgcctttggcatttaggaagggttgtatagctcatgttaaatattgcactaaaaatgtttttgatggttttcctccctttgaactagacacacttctaatatttggtttatagttttaaattataactttcagcatcaaatatttccatacaacagtcaattacatgatgtgttttcttttttctacctcctttacctgccacttctcataatagtatttgaacctaaacatataccggtgacattctgtgattatcatcttgcccctaccttggtttttggtttagatccacaatgaaatatattaacgctcatgagctattcaaaagtgaatgtcacagtcatcacttgctgagtggtactcatccttaacagagtcctcatgagggaatcaggtctcgctgagtttagcatgtttaataatcttttctcacggtctcgatacatggatcgcattactagatataaggtgcttgcccaaaatgatttttctggagtttttaggagatattgtcttccttgggggacatacatggtgtatgttctcattgtgggattcgattttgttctaccaggacctctaatttctgccagttacttcactcatttgttctcttcaccatgagtctccagaggatacttccatggtccgtgcctccccatctcccagtaattctgcatttccaagattggcacctctggtcctctgcacggtgaagccccttcctttcaattccccagtagccagtgctctaatccaccaggtctcaggcatgatctatgtttctccacactcgctttctgaggatagttttgcctgggttctatcatgaacaggccctccctgctgtcctggcctctatttgcatagtgtttcctgctccctctgccgtcgtgtggctcccagacctggctaaagaaaatcacctgagggccacagtgttccctagccctggtgtttaggggcaggattatgggtgagatttttgagtctctaagttgacccctacggctctgaagtgtatgttgagaaattcagctgttatcatcctaggtggacttgctccctcctatcctcctacttcaaatgcagaacttcaatcgtttacaaaagaagactgaatcgtataatagaacacacccttattcattggctggcttcaccaatctcatggctgaacttgtaaaaatacaatcttagccacatacctatgaaatgtatatgtgtgtgtatatatatacatgaatttgcttctgagattatggaggctgaaattcccaagatggaaggaaagctggatacccaggaaagcatttgtttcccattaggcctcttaattctctcctggcccttgattgattgcatgaggcccacccctattaaggagggcaatctgcttcacttagtctgcccatcccaatgttaatcgtatctgaaagactctctggaacacaaccagaatcatgtttggccaaatgtcctggcaccctggtgctcggtcacagtgacaagtacaagtaactatcacacatgccctttgtcatattggtgatttccactgtttttctcccaaactgcagcttatatttgttctcttagtactgttgagcaaaaacttaatttttataaagtcgaatttatcaatgttttctttaatggtttgtgtttattgataataaagaacactttacctaactctgtgtcatgaagattttgtcttatattttctgctatactttttctagttttatagtttatatttagttgcataatccattttgagttagtttttgagttagtattgaggttcaggtgaatttttttcctttggggataaaaaaaaaattgtgtaaaaaaaagttgtttctacacaatttgttgacaagagaatgccttctccactgaatcatatttgcacctttgtcaatccattgggtggttgagactggtgagaggactgtcctggtgtttggacagagagacagggcatgaagtagggtggttcttatgggaaaaattaaggaagacacatttttccatgaggaataggaaatccccaagcacaattgggggtaccctctac

SEQ ID NO: 989 - DNA, 2871 bp, Homo sapiens
ttgtttatagaggacaggtcagctgtctggctcaatgatctacattctgaagttgtctgaaaatgtcttcatgattaaattcagcctaaactttttgacgggaacactgcagagacaatgctgtgagtttccaacctcagcccatctgcgggcagagaaggtctagtttgtccaacaccattatgatatcaggactggttacttggttaaggaggggtctaggagatctgtcccttttagagacaccttacttataatgaagtacttgggaaagtggttttcaagagtataaatatcctgtattctaatgatcatcctctaaacattttatcatttattaatcctccctgcctgtgtctattattatattcatatctctacgctgcaaattttgggtctcaatttttactgtgcctttgtttttactagtgtctgctgttgcaaaaagaagaaaacattctttgcctgagttttaatttttgtccaaagttaattttaatctatacaattaaaaccttttgcctatcactctggacttttggattgttttttacattcagtgttataatatttgattatgctgattggttttggtgggtactgatgcgaattaataaaaacatttcatttccatgtttattttctaatctcttccacattgtaggctatgtttaccatacgtagcagaatgtatttacatttcttggttctagtcatttgtattcttcgtgagtgtgtgtgtgtgtgtgtgtctgtgtgtgtgtcctgtgtgtgcctttggcatttaggaagggttgtatagctcatgttaaatattgcactaaaaatgtttttgatggttttcctccctttgaactagacacacttctaatatttggtttatagttttaaattataactttcagcatcaaatatttccatacaacagtcaattacatgatgtgttttctttttcctacctcctttacctgccacttctcataatagtatttgaacctaaacatataccggtgacattctgtgattatcatcctgcccctaccttggtttttatccattgtggtttagatccataatgaaatatattaacgctcatgagctattcaaaagtgaatgtcactgtcatcacttgctgagtggtactcatccttaacagagtcctcatgagggaatcaggtctcgctgagtttagcatgtttaataatcttttctcacggtctcgatacatggatcacattactagatataaggtgcttgtccaaaatgatttttctggagcttttaggagatattgtcatccttgggggacatacatggtgtatgttctcattgtgggattctattttgttctaccaggacctctaatttctgccagttacttcattcatttgttctcttcgccatgagtctccagaggatacttccatggtccgtgcctccccatctcccagcaattctgcatttccaagattggcacctctggtcctctgcacggtgaagccccttcctttcaattccccagtagccagtgctctaatccaccaggtctcaggcatgatctatgtttctccacactcgctttctgaggagagttttgcctgggttctatcatgaacaggccctccctgctgtcctggcctctatttgcatagtgtttcctgctccctctgccgtcgtgtggctcccagtcctggctaaagaaaatcacctgagggccacagtgttccctagccctggtgtttagggcaggattatgggtgagatttttgagtctctaagttgacccctatggctctgaagtgtaagttgagaaattcagctgttatcatcctaggtggacttgctccctcctatcctcctacttcaaatgcagaacttcaatcgtttacaaaagaagactgaatcgtataatagaacacacccttattcattggctggcttcaccaatcatctcatggctgaacttgtaaaaatacaatcttagccacatacctatgaaatgtatatgtgtgtgtatatatatacatgaatttgcttctgagattatggaggctgaaattcccaagatggaaggaaagctggatatccaggaaagcatttgtttcccattaggcctcttaattctctcctggcccttgattgattgcatgaggcccacccctattaaggagggcaatctgcttcacttagtctgcccatcccaatgttaatcgtatctgaaagactctctggaacacaaccagaatcatgtttggccaaatgtcctggcaccctggtgctcggtcacagtgacaactacaagtaactatcacacatgccctttgtcatattggtgatttccactgtttttctcccaaactgcagcttatatttgttctcttaatactgttgagcaaaaacttttaatttttataaagtcgaatttatcaatgttttcttcaatggtttgtgtttattgataataaagaacactttgcctaactctgtgtcatgaagattttgtcttatattttctgctatactttttctagttttatagtttatatttagttgcataatccattttgagttaatttttgagttagtattgaggttcaggtgaatttttttcctatggggataaagaaaaacaaattgtgtaaaaaaagttgtttctacacaatttgttgacaagagaatgccttctccactgaatcatatttgcacctttgtcaatccattgggtggttgagactggtgagaggactgtcctggtgtttggacagagagacagggcatgaagtagggtggttcttatgggaaaaattaaggaagacacatttttgcatgaggaataggaaatccccaagcacaattgggggtaccttctac

SEQ ID NO: 990 - DNA, 4998 bp, Homo sapiens
gcagttagtataattgtattttaattaaatagggaggttgaagattttttaaatatcaaattctgtaaataaaaagtatgatttacagtctgaaatggaagaaggcagtggattaaacattgcagaagagaagattattgaactagaaggaatagaatttgaaactaacataaatgaaacacacagtaacaaatgacttgaaaacataaaaagaccatcggcatcaaaactttaaaccccccagtatagggctaaatggaatccctgaagggcgtgtagtggagaagagagaaaaagatatttaaaacatactggatgaaagatttagaagctccatggaaaccataaacttcaaatattacagaaatatgattattctaagaacaagaaacatgaagaaaacttcaccaaggaatgccttaatcaaatccatcaaaaccagtgataaaaaggaaatcctaaaaggaataaaaagggaaagaacatgttacatacagagcactaaatataatgatggcataagatttctcatacaaacaagaagtttgcaataaagaacttaaaaaaaagaaaaactgtcacctacaattctacacctggccaaattatcttttaaaaataaacatgagaaaaagtgtttttgaacagaaaacaaaatgatctcaatttgcagatggtgtgatcctatgcatagaaaatcccaaataatacctacagatgcaaacacacatacatgcacacagaggccagtcacacacacacacacacacacacactcacatacacacactactagagttaataagcgaattcagcaaactttcagcaaacaatcagttgtgttagcaatgaacaatctgagaagaaaattgacacaatgatttcatttataatagcactggtaagaataatatgcctgggaataaatttgttcaagaaggtgcagtacttgtacacagacaactacagaacattgctcgaggagattcaggaagacctaaatcaatggacagacatcttgtgtccatgggttggaagttgtaacatggttaagataaaaatacaactcaaagcaacccacagattcaatacaatcctatcaaaaagtggccttttttacaggaatgcctaacaagaacttcatattcctaaaaaatagtgtgtccccccaaaacaaaagcaatcttgaaatgcaagaagaaacattttctattccaaaggtctttaactgctctaagcagtacttggtagtcttcaatatataggctttcacatctctttttttcttcttttgtttctgcacaggatctcactctttcacccaggctggagtacagtggcacaatcacagctcactgcagcatggaattctcaggcctatgacatcctagggcctcatccactgattcctgggactacaggctcacaccaccaaacccggataatttttctgattttcagtagagatgagggctcactatgttgcctaggctagtttcaagcttatgagatcaagcaaccctcctgccacagccttccaaagtgctgggatttgaggccaagcctggctggctttcatgtcttttctatgtagtttatatttctggatgccattgagagtctggctggctttcacatatttgctatgtcgtttatatttcttgatgctattgtaaatgtttattaaaggaatcttttaaaaactttgttttggccaggcgcggtggtccatgcctgtaatcctaccactttgggaggccgaggtgggtggatcatgaggtcagaagatcgagaccatcctggctaacatggtgaaaccccatctctactaaaaatacaaaaaaaaaaaaattagcctggcgtggtggcgggcgcctgtagtcccagatacttgggaggctgaggcaggagaatggcgtgaacctgggaggtggagcttgcagtgagccaagatggtgccactgcactccagcctgggagacagagtgagactccgtctcaaaaaaaaaattgtattaaaattatatatttaaggaattacatatatatttatatatatatataatacatatccttaaattatatatatttaaggaatacaacctgaggactacatatacatatacataatgaactaatgcctactaggtgaggggctgccttgtgagcaaacccaaggtccttggcttatgaagcctttgtctagaaggatggagggatcagcaaggtgggcacacagcaggttctgtctttggtgtgggcttctgcccactcgggtctctggcaatactaatcaggcttcacgatgggtgaggtgagctaggaatgggaaagtggatgacttcagatccagagactgcagttgtcacctggggacctggcgtaggggtggaggagtctcccactgacttggccatgggtcaatgcccaaacatgcacaaggatgggactctcggcctcaatgctttaggagcccccagtcttctaaagagggtttgtggtggggaagaatgttcaacaaaacagaagagttatgggtgctctagcttggcaacggagaatacttccttgtgctactaaatggcaatatttgacaattacggatgacacaattgagcaacagctttcactgtttaacaagcagtgtctctggaacactaggttagtgctgtcggatgttgactgaaaagtcagtggtttgagcccatccagtcatattaatgtttctagctgacgtgaccttccatctgaagagtctcttccttggaccaaatatctcttaaagcttctcttcttcttgtctcttgtctattttctaaggtgcctctttgttgcttggggcaaaaaaagtccatttttaatccacacccaacaaacatctacccttacgtatcctggtttttagggttttgagtttgttgtttgttttctcagcttctcatatttggaatactggaaattcctaaagtggagaatgacagaacgtgaatcacagctatggtgaagccacaggctctggatgaaaaacctaatctgccagggtttgaagttaaacacattaatcttctgtgcctccatttctatctgtccaatgggctaaatcagaacacttaggttgtccagtgtttaaatgagcagtgcaggaaaagcatggagccaatgcctgtcacgtagtaattggacaacacgcatgagctcctatcagcgccatggtctccagcatttccatcaggttttgatctttgaaatgtccttcttgatatgaaaggatcattcctcaaacattctctaaccgatggccatgaaattgctccaatgtgtattattacaaatacaactgcagggaccagactgacacatgtatctgtcgtgcatcgcttgtctatttctccgtagacacctggagatggaattgtcagaccaaagtatttatacatgtttgattttgctaatttctgtctaaattactgtgaaaagaaaatataatatgtcatacttttaatattttttgagaattcttttttctccatcttctggtcaaaactgggaagtacttgcctaccatttcctctgaacttacttttgccaacatttgtgtagtcatacagtgggatcacattgtatgcaagacatcaaactcaaatccttaaatgaaagcgattaacatgactgtgtaaaaacttatcttcaaaatacaatgaatacatatatacacatacttatatgggaaaggaattatttggatactttatcaaagttatatatacttgaaaatttgtttagtaaaatagcagtgcccttgtgtactcccagagtttcatcacatagaagcaattatttcattatttatctccttatgcctaaatagatattattactttttgattttcaagtttaggcactacctctccttcacatacttgctcatcaccaccacccccaaacacgcctctcaccaccttacccttcaacacgtttgtgtcctcgtttgctgggtcaattgctacattgttataacttgtatattttattcagagttcagtcacattggatatacatagcaggaatgagaggccagtatcttcagggactctctctcaagtagataagcttcagagatttttgtagtctttggtcactctccccatctttttcctattccaggtaagtactggatctgatgggcccagctcaggtcaggcactctctccttgagcaggggagagcgggacatcttcatgtgcagtaccaggaagacactgtccaaagagggacaggtagttctaagacagaaaagtctgtctggggtacaggtaggcaaaacaaggacacacacacaaaaattagtctgttctgtgaggggagcatgcagtagagggtggattcagagtgggaggggagagttttgagagatatgggccatggatatcactctgtgggccggagccacacaagacggttggggtctctcaggggcagggagctgaggaggatctgccctccccaacctgggagactggtgaggggactgtcctggtcaccagacagaaatggggtctgggccagggcagttctggtgggaaagaaagaacaggacatctccttaaggaaaggtcctgagtcaggtcttggtagggagggaggttaccttgcccattggcagctgaagatggttggccagatgagggcactgaaatccatgtcctctaaacttgtagttcagtaaaagaacgacagcagtaaagggtctttaggaagaggaggtggaagacctgatttgggttgggggctccaagaagaatgtctgccttgctgtgcagaagcctgctacacaacctccctggtccccttgctcagtctcctggccagacccctgtgagccctggaagtgcacagtcagctcggccaaggcatctccagccaggactcatccctgggcatttctgtggccttgggtgccctggcctccaggccctgtcttgcaggcaatcatcctgc

SEQ ID NO: 991 - DNA, 437 bp, Homo sapiens
gaaattgaaaagtaccaagaagtggaagaagaccaagacccatcatgccccaggtaactttgagcaattatggatgcttaattctgtgttgacacctggagatgccaggtccagggaaaacaagagtgtgttcaatttcatgttttcaacggaggttgaattactcctactgccattgctgttggttttcattgcagtagatgtttaggtttccatttcttcctccccttatcatttactaacttactataggttgaccatacctcaaaggctgtatggcaactgcatggaatcttgagcaagtttatggaaaattattgagcccactcttttcatgatcactgttcgctgtgtgtcccgagggcactaactcagagtgtcctttgaccccttcatcagtgtgtcacccggccaattcgctgagctcactttctcct

SEQ ID NO: 992 - DNA, 5008 bp, Homo sapiens
gcagttagtataattgtattttaattaaatggggaggttgaagattttttaaatatcaaattctgtagataaaaagtatgatttacagtctgaagtggaagaaggcagtggattaaacattgcagaagagaagattattgaactagaaggaatagaagttgaaactaacataaatgaaacacacagtaacaaatgacttgaaaacataaaaagaccattggcatcaaaactttaaaccccccagtatagggctaaatggaatccctgaagggcgtgtagtggagaagagagacaaagatatttaaaacatactggatgaaagatttagaagctccatggaaaccataaacttcaaatattacagaaatatgattattctaagaacaagaaacatgaagaaaacttcaccaaggaacgccttaatcaaatccatcaaaaccagtgataaaaaggaaatcctaaaaggaataaaaagggaaagaacatgttacatacagagcactaaatataaggatggcataagatttctcatacaaacaagaagtttgcaataaagaacttaaaaaaagaaaaactgtcacctacaattctacacctggccaaattatcttttaaaaataaacatgagaaaaagtatttttgaacagaaaacaaaatgatctcaatttgcagatgttgtgatcctatacatagaaaatcccaaataatacctacagatgcaaacacacatacatgcatacagaggccagacacacacacacacacacacacacacacacacactcacatacacacactactagagttaataagtgaattcagcaaactttcagcaaacaatcagttgtgttagcaatgaacaatctgagaagaaaattgacacaatgatttcatttataatagcacttgtaagaataatatgcctgagaataaatttgttcaagaaggtgccgtacttgtacacagacaactacagaacattgctcgaggagattcaggaagacctaaatcaatggacagacatcttgtgtccatgggttggaagttgtaacatggttaagataaaaatacaactcaaagcaacccacagattcaatacaatcctatcaagaagtggccttttttacaggaatgcctaagaagaacttcatattcctaaaaaatagtgtgtccccccaaaacaaaagcaatcttgaaatgcaagaagaaacattttctattccaaaggtctttaactgctctaagcagtacttggtagtcttcaatatataggctttcatatctctttttttcttcttttgtttctgcacaggatctcactctttcacccaggctggagtacagtggcacaatcacagctcactgcagcatggaattctcaggcctatgacatcctagggcctcatccactgattcctgggactacaggctcacaccaccaaacctggataatttttctgattttcagtagagatgagggctcactatgttgcctaggctagtttcaagcttctgagatcaagcaaccctcctgccacagccttccaaagtgctgggattcgaagccaagcctggctggctttcatgtcttttctatgtagtttatgtttctggatgccattgagagtctggctggctttcacatatttgctatgtcgtttatatttcttgatgttattgtaaatgtttattaaaggaatcttttaaaaactttgttttggccaggtgcggtggtccacgcctgtaatcctagcactttgggaggccgaggtgggtggatcatgaggtcagaagatcgagaccatcctggctaacatggtgaaaccccattcctactaaaaatacaaaaaaaaaaattagcctggcgtgatggcgggcgcctgtagtcccaggtacttggaaggctgaggcaggagaatggcgtgaacctgggaggtggagcttgcagtgagccaagatggtgccactgcactccagcctgggagacagagtgagactccgtctcaaaaaaaaaaaattgtattaaaattatatatttaaggaattacatatatatttatatatatataatacatatccttaaattatatatatttaaggaatacaatctgaggactacatatacatatacataatgaactaatgcctactaggtgaggggctgccttgtgagcaaacccaaggtccctggcttatgaagcctttgtctagaaggagggagggatcagcaaggtgggcacacagcaggttctgtctttggtgtgggcatctgcccactcgggtctctggcaatactaaccaggcttcacgatgggtgaggtgagctaggaatgggaaagtggatgacttcagatccagagactgcagttgtcacctggggacctggcgtaggcgtggaggagtctcccactgacttggccctgggtcaatgcccaaacatgcacaaggacgggactctcggcctcaatgctttaggggcccccagtcttctaaagagggtttgtggtggggaagaatgttcaacaaaacagaagagttatgggtactctagcttggcaacggagaatacttccttgtgctactaaatggcaatatttgacaattacggatgacacaattgagcaacagctttcactgtttaacaagcagtgtctctggaacactgggttagtgctgtcggatgttgactgaaaagtcagtggtttgagcccatccagtcatattaatgtttctagctgatgtgaccttccatctgaagagtctcttccttggaccaaatatctcttaaagcttctcttcttcttgtctcttgtctattttctaaggtgcctctttgttgcttggggcaaaaaaagtccattttaaatccacacccaacaaacatctacccttacgtatcctggtttttagggttttgagtttgttgtttgttttctcagcttctcatatttggaatactggaaattcctaaagtggaaaatgacagaacgtgaatcacagctatggtgaagccacaggctctggatgaaaaacctaatctgccagggtttgaagttaaacacatgaatcttctgtgcctccatttctatctgtccaatgggctaaatcagaacacttaggttgtccagtgtttaaatgagcagtgcaggaaaagcctggagccaatgcctgtcatgtagtaattggtcaacacgcatgagctcctatcagcgccatggtctccagcatttccatcaggctttgatctttgaaatgtccttcttgatatgaatggatcattcctcaaacattctctaactgatggccatgaaattgctccaatgtgtattattacaaatacaactgcagggaccagactgacacatgtatctgtcgtgcatcgcttgtctatttctctgtagacacctggagatggaattgtcagaccaaagtatttatacatttttgattttgctaatttctgtctaaattactgtgaaaagaagatataacatgtcatacttttaacattttttgagaattctctttttctccatcttctggccaaaactgggaagtacttgcctaccaattcctctgaactcacttttgccaacatttgtgtagtcatacagtgagatcacattgtatgcaagacatcaaactcaaatccttaaatgaaagcgattaacatgactgtgtaaaaatttatcttcaaaatacaatgaatacatatatacacatatttatatgggaaaggaattatttggatactttatcaaagttatatatacttgaaaatttgtttagtaaaatagcagtccccttgtgtactcccagagtttcatcacatagaagcaattatttcgttatttatctccttatgtctaaatagatattattactttttgattttcaagtttaggcactacctctccttcacatacttgctcatcaccaccacccccaaacacgcctctcaccaccttaccctccaacacgtttgtgtcctcatttgctgggtcaattgctacattgttataacttgtatattttattcagagttcagtcacattggatatacatagcaggaatgagaggccagtatcttcagggactctctctcaagtagataagcttcaaagatttttgcaatctttggtcaccctccccatcgttttcctattccaggtaagtactggatctgatgggcccagctcaggtcaggcactctctccttgagcaggggagagcgggacatcttcatgtgtactaccaggaagacactgttcaaagagggacaggtagttctaagacagaaaagtctgtctggggtacaggtaggcaaaacaaggacacacacacaaaaattagtctgttctgtgaggggagcatgcagtagagggtggattcagagtgggaggggagagttttgagagatatgggccatggatatcactctgtgggccggagccacacaagacggttggggtctttcaggggcagggagctgaggaggatctgccctccccaacctgggagactggtgaggggactgtcctggtcaccagacagaaatggggtctgggccagggcggttctggtgggaaagaaagaacaggacatctccttaaggaaaggtcctgagtcaggtcttagtagggagagaggttaccttgggcattggcagctgaagatgcttggccagatgagggcactgaaatccatgtcctataaacttgtagttctagtaaaagaatgacagcagtaaagggtctttaggaagaggaggtggaagacctgttttgggttgggggctccaagaagaatgtctgccttgctgtgcagaagcctgctacacaacctccctggtccccttccttagtctcctggccagacccctgtgagccctggaagtgcacaatcagctcagccaaggcatctccagctgggactcatccctgggcatttctgtggccttgggtgccctggcctcctccaggccctgtcttgcaggcaatcatcctgc

SEQ ID NO: 993 - DNA, 423 bp, Homo sapiens
ctggtatgttttctagataaatggctgacttttcacccacaaaagccataatagctgatgcttctgtgtagaaccaagtttcattttgactcaagagctggtacattgcaccccctcatcaaatctctgtgtccacaatctcataaactatcaaattctgggtatttgatgagagaaagcttaatattgaagtatctctcctatgaggtgttagaactatttgcctacaatttattggggaaaaaattgctcatttgtgtacataaacctaggacagagcacatagggaagataacattccaactcaggggaattttgcccaaggctcatgaaagaacccaagccagttttctcaagacttgacctcaggcctactggaatatttctctcaaagtctcctgttctcacattgacaagactgat

SEQ ID NO: 994 - DNA, 560 bp, Homo sapiens
gcagttagtataattgtattttaattaaatagggaggttgaagattttttaaatatcaaattctgtaaataaaaagtatgatttacagtctgaaatggaagaaggcagtggattaaacattgcagaagagaagattattgaactagaaggaatacaagttgaaactaacataaatcaaacacacagtaacaaatgacatgaaaacataaaaagaccatcggcatcaaaactttaaaccccctagtatagggctaaatggaatccctgaagggcgtgtagtggagaagagagacaaagatatttaaaacatactggatgaaagatttagaagctccatggaaaccataaacttcaaatattacagaaatatgattattctaagaacaagaaacatgaagaaaacttcaccaaggaacgccttaatcaaatccatcaaaaccagtgataaaaaggaaatcctaagaagaataaaaagggaaagaacatgttacatacagagcactaaatataatgatggcataagatttctcatacaaacaagaagtttgcaataaagtact
